(19) United States
(12) Patent Application Publication
(10) Pub. No.: US 2020/0289609 A1
(43) Pub. Date: Sep. 17, 2020

(54) PEPTIDOMIMETIC MACROCYCLES AND USES THEREOF

(71) Applicant: Aileron Therapeutics, Inc., Watertown, MA (US)

(72) Inventors: Vojislav VUKOVIC, Arlington, MA (US); Luis CARVAJAL, Acton, MA (US); David Allen ANNIS, Cambridge, MA (US)

(21) Appl. No.: 16/818,284

(22) Filed: Mar. 13, 2020

Related U.S. Application Data
(60) Provisional application No. 62/926,018, filed on Oct. 25, 2019.
(60) Provisional application No. 62/819,195, filed on Mar. 15, 2019.

(51) Int. Cl. A61K 38/12; A61K 31/337; A61P 35/00

(52) U.S. Cl. CPC A61K 38/12; A61P 35/00; A61K 31/337

(57) ABSTRACT

The present disclosure describes methods of using peptidomimetic macrocycles in combination with an additional therapy to treat a condition, for example, cancer. In some embodiments, the peptidomimetic macrocycle can mitigate a side effect (e.g., mucositis, neutropenia, or thrombocytopenia) of the additional therapy.

### CROSS REFERENCE

[0001] This application claims the benefit of U.S. Provisional Application No. 62/819,195 filed Mar. 15, 2019, and U.S. Provisional Application No. 62/926,018, filed Oct. 25, 2019, each of which is incorporated by reference in its entirety.

### SEQUENCE LISTING

[0002] The instant application contains a Sequence Listing which has been submitted electronically in ASCII format and is hereby incorporated by reference in its entirety. Said ASCII copy, created on Mar. 26, 2020, is named 35224-834_201_SL.txt and is 1,600,680 bytes in size.

### BACKGROUND

[0003] Side effects that can result from anticancer therapies include myelosuppression and mucositis. Myelosuppression relates to the destruction of bone marrow, while mucositis involves inflammation and ulceration of mucous membranes of the digestive tract. Side effects such as myelosuppression and mucositis can limit the dose of an anticancer therapy that can be safely administered to a patient.

### INCORPORATION BY REFERENCE

[0004] All publications, patents, and patent applications mentioned in this specification are herein incorporated by reference to the same extent as if each individual publication, patent, or patent application was specifically and individually indicated to be incorporated by reference.

### SUMMARY

[0005] In some embodiments, the disclosure provides a method of treating a tumor in a subject in need thereof, the method comprising administering to the subject a therapeutically effective amount of a peptidomimetic macrocycle and a therapeutically effective amount of a first additional pharmaceutically-active agent, wherein the administration of the peptidomimetic macrocycle induces cell cycle arrest in a non-cancerous tissue in the subject, the administration of the peptidomimetic macrocycle does not induce cell cycle arrest in the tumor; and the administration of the peptidomimetic macrocycle does not induce apoptosis in the tumor.

[0006] In some embodiments, the disclosure provides a method of treating a cancer in a subject in need thereof, the method comprising administering to the subject a therapeutically effective amount of a peptidomimetic macrocycle and a therapeutically effective amount of a first additional pharmaceutically-active agent, wherein the cancer has a p53 deactivating mutation; a non-cancerous tissue of the subject comprises a functional p53 protein; and the non-cancerous tissue is bone marrow or digestive tract tissue.

[0007] In some embodiments, the disclosure provides a method of treating a tumor in a subject in need thereof, the method comprising administering to the subject a therapeutically effective amount of a peptidomimetic macrocycle and a therapeutically effective amount of a first additional pharmaceutically-active agent, wherein the administration of the peptidomimetic macrocycle does not induce cell cycle arrest in the tumor; the administration of the peptidomimetic macrocycle does not induce apoptosis in the tumor; the therapeutically effective amount of the first additional pharmaceutically-active agent is associated with a side effect; and the administration of the peptidomimetic macrocycle reduces a likelihood of the subject developing the side effect.

### BRIEF DESCRIPTION OF THE DRAWINGS

[0008] FIG. 1 shows the human wild type p53 protein sequence (SEQ ID NO: 1949).

[0009] FIG. 2 presents a schematic showing dose dependent effects of peptidomimetic macrocycles on cell cycle arrest and cell death.

[0010] FIG. 3 presents a schematic showing the mechanism of how a combination treatment of chemotherapy and the peptidomimetic macrocycle AP-1 can treat p53 mutant tumors and prevent myelosuppression.

[0011] FIG. 4 presents data that shows the effect of AP-1 in p53 wild type cells vs. p53 mutant cells.

[0012] FIG. 5 presents data on the effect of AP-1 on apoptosis (top panel) and cell cycle arrest (bottom panel). For each group of bar graphs shown in the top panel, the following dose levels of AP-1 are represented in order from left to right: vehicle control, 1 μM, 5 μM, and 10 μM. For each group of bar graphs shown in the bottom panel, the following dose levels of AP-1 are represented in order from left to right: vehicle control, 1 μM, and 2.5 μM.

[0013] FIG. 6 shows the effect of AP-1 on DNA-synthesis and cell cycle arrest in CD34⁺ bone marrow cells.

[0014] FIG. 7 shows the percentage of 5-ethynyl-2′-deoxyuridine (EdU) positive CD34⁺ bone marrow cells (which is indicative of cells in S-phase) at two different time points following treatment with vehicle or AP-1.

[0015] FIG. 8 shows the effect of pretreatment with AP-1 on topotecan induced DNA damage as measured by γH2AX incorporation.

[0016] FIG. 9 shows mRNA expression levels of p21, p53 upregulated modulator of apoptosis (PUMA), and Noxa in mouse bone marrow cells following in vivo treatment with a single dose of AP-1.

[0017] FIG. 10 shows EdU incorporation in hematopoietic stem and progenitor cells following in vivo treatment with a single dose of AP-1 at 10 mg/kg.

[0018] FIG. 11 shows EdU incorporation in lineage negative, Kit positive hematopoietic stem and progenitor cells following in vivo treatment with a single dose of AP-1.

[0019] FIG. 12 shows serum levels of macrophage inhibitory cytokine-1 (MIC-1) in mice following treatment with a single dose of AP-1.

[0020] FIG. 13 shows p53, p21, and bromodeoxyuridine (BrdU) staining in MCF-7 mouse tumors following treatment with 20 mg/kg AP-1.

[0021] FIG. 14 shows quantification of p53, p21, poly(ADP-ribose) polymerase (PARP), and BrdU staining in MCF-7 tumor tissue following treatment with 20 mg/kg AP-1.

[0022] FIG. 15 shows MCF-7.1 tumor volume in mice following treatment with vehicle, AP-1, Abraxane®, or AP-1 in combination with Abraxane®.

[0023] FIG. 16A and FIG. 16B show neutrophil levels is mice following treatment with vehicle, AP-1, topotecan, or a combination of AP-1 and topotecan.

[0024] FIG. 16C shows neutrophil levels in mice of two different treatment groups.

[0025] FIG. 16D shows neutrophil levels in mice of two different treatment groups.

[0026] FIG. 17A shows median tumor volume and mouse survival in a MC38 tumor mouse cancer model following treatment with vehicle, AP-1, topotecan, or a combination of AP-1 and topotecan.

[0027] FIG. 17B shows median tumor volume and mouse survival in a H69 tumor mouse cancer model following treatment with vehicle, AP-1, topotecan, or a combination of AP-1 and topotecan.

[0028] FIG. 17C shows median tumor volume and mouse survival in a H211 tumor mouse cancer model following treatment with vehicle, AP-1, topotecan, or a combination of AP-1 and topotecan.

[0029] FIG. 18A shows neutrophil levels in mice following treatment with vehicle, AP-1, carboplatin and paclitaxel, or carboplatin and paclitaxel in combination with AP-1.

[0030] FIG. 18B shows neutrophil levels in mice of two separate treatment groups.

[0031] FIG. 19 shows neutrophil levels in mice following treatment with vehicle, AP-1, docetaxel, or AP-1 in combination with docetaxel.

[0032] FIG. 20 shows a schematic of the study design for a small cell lung cancer Phase 1b dose optimization study (RP2D=recommended Phase 2 dose).

[0033] FIG. 21 shows a schematic of the study design for a small cell lung cancer Phase 1b dose expansion study.

[0034] FIG. 22 shows a schematic of the study design for a small cell lung cancer Phase 2 trial (RP2D=recommended Phase 2 dose).

[0035] FIG. 23 shows histological sections of gut tissue from mice treated with topotecan alone or topotecan in combination with AP-1.

[0036] FIG. 24A shows histological scores of hypertrophy/hyperplasia in intestinal tissue of mice following treatment with vehicle, AP-1, topotecan, or a combination of AP-1 and topotecan.

[0037] FIG. 24B shows histological scores of hypertrophy/hyperplasia in intestinal tissue of mice in two separate treatment groups.

### DETAILED DESCRIPTION

[0038] Anticancer therapies such as, for example, chemotherapeutic agents can have dose limiting side effects that can limit the efficacy of such therapies. Dose limiting side effects can include, for example, myelosuppression and mucositis. Mucositis can lead to painful inflammation and ulceration of mucous membranes lining the digestive tract. Ulcerations can lead to weight loss, infection, and/or sepsis. Myelosuppression can lead to a decrease in the production of cells responsible for providing immunity (leukocytes), carrying oxygen (erythrocytes), and the mediation of blood clotting (thrombocytes). Myelosuppression can have serious consequences for a subject and can result in a weakened immune system, anemia, neutropenia, thrombocytopenia, and/or spontaneous and severe bleeding. Mucositis and myelosuppression can result from anticancer therapy-induced cytotoxicity in cells of the digestive tract and bone marrow, respectively. In some instances, inducing cell cycle arrest in cells can protect the cells from the cytotoxic effects of anticancer therapies (e.g., chemotherapeutic agents).

[0039] Cell cycle arrest can be induced via activation of the human transcription factor protein p53, which is encoded by the TP53 gene. The E3 ubiquitin ligase MDM2, also known as HDM2, negatively regulates p53 function through a direct binding interaction that neutralizes the p53 transactivation activity. Neutralization of p53 transactivation activity leads to export from the nucleus of p53 protein, which targets p53 for degradation via the ubiquitylation-proteasomal pathway.

[0040] MDMX (MDM4) is a negative regulator of p53, and significant structural homology exists between the p53 binding interfaces of MDM2 and MDMX. The p53-MDM2 and p53-MDMX protein-protein interactions are mediated by the same 15-residue alpha-helical transactivation domain of p53, which inserts into hydrophobic clefts on the surface of MDM2 and MDMX. Three residues within this domain of p53 (F19, W23, and L26) are essential for binding to MDM2 and MDMX.

[0041] Described herein are p53-based peptidomimetic macrocycles that modulate an activity of p53. Peptidomimetic macrocycles of the disclosure can modulate p53 activity by, for example, inhibiting the interactions between p53 and MDM2 and/or p53 and MDMX proteins. Also provided herein are uses of p53-based peptidomimetic macrocycles and an additional pharmaceutically-active agent for the treatment of a condition, for example, cancer or another hyperproliferative disease. Further, provided herein are p53-based peptidomimetic macrocycles that can be used to mitigate a side effect (e.g., myelosuppression or mucositis) caused by a second pharmaceutically-active agent. For example, a method disclosed herein can comprise treating cancer in subject in need thereof by administering a peptidomimetic macrocycles in combination with a second pharmaceutically-active agent (e.g., a chemotherapeutic agent). In some instances, the peptidomimetic macrocycle can induce cell cycle arrest in the bone marrow and/or digestive tract tissue of the subject and mitigate a myelosuppression related side effect (e.g., neutropenia or thrombocytopenia) and/or mucositis caused by the second pharmaceutically-active agent.

### Definitions

[0042] As used herein, the term “macrocycle” refers to a molecule having a chemical structure including a ring or cycle formed by at least 9 covalently bonded atoms.

[0043] As used herein, the term “peptidomimetic macrocycle” or “crosslinked polypeptide” refers to a compound comprising a plurality of amino acid residues joined by a plurality of peptide bonds and at least one macrocycle-forming linker which forms a macrocycle between a first naturally-occurring or non-naturally-occurring amino acid residue (or analogue) and a second naturally-occurring or non-naturally-occurring amino acid residue (or analogue) within the same molecule. Peptidomimetic macrocycle include embodiments where the macrocycle-forming linker connects the α-carbon of the first amino acid residue (or analogue) to the α-carbon of the second amino acid residue (or analogue). The peptidomimetic macrocycles optionally include one or more non-peptide bonds between one or more amino acid residues and/or amino acid analogue residues, and optionally include one or more non-naturally-occurring amino acid residues or amino acid analogue residues in addition to any which form the macrocycle. A “corresponding uncrosslinked polypeptide” when referred to in the context of a peptidomimetic macrocycle is understood to relate to a polypeptide of the same length as the macrocycle and comprising the equivalent natural amino acids of the wild-type sequence corresponding to the macrocycle.

[0044] AP-1 is an alpha helical hydrocarbon crosslinked polypeptide macrocycle with an amino acid sequence less than 20 amino acids long that is derived from the transactivation domain of wild type human p53 protein. AP-1 contains a phenylalanine, a tryptophan and a leucine amino acid in the same positions relative to each other as in the transactivation domain of wild type human p53 protein. AP-1 has a single cross link spanning amino acids in the i to the i+7 position of the amino acid sequence and has more than three amino acids between the i+7 position and the carboxyl terminus. AP-1 binds to human MDM2 and MDM4 and has an observed mass of 950-975 m/e as measured by electrospray ionization-mass spectrometry.

[0045] As used herein, the term “stability” refers to the maintenance of a defined secondary structure in solution by a peptidomimetic macrocycle as measured by circular dichroism, NMR or another biophysical measure, or resistance to proteolytic degradation in vitro or in vivo. Non-limiting examples of secondary structures contemplated herein are α-helices, 3₁₀ helices, β-turns, and β-pleated sheets.

[0046] As used herein, the term “helical stability” refers to the maintenance of an α-helical structure by a peptidomimetic macrocycle as measured by circular dichroism or NMR. In some embodiments, a peptidomimetic macrocycle can exhibit at least a 1.25, 1.5, 1.75, or 2-fold increase in α-helicity as determined by circular dichroism compared to a corresponding uncrosslinked macrocycle.

[0047] The term “amino acid” refers to a molecule containing both an amino group and a carboxyl group. Suitable amino acids include, without limitation, both the D- and L-isomers of the naturally-occurring amino acids, as well as non-naturally-occurring amino acids prepared by organic synthesis or other metabolic routes. The term amino acid, as used herein, includes, without limitation, α-amino acids, natural amino acids, non-natural amino acids, and amino acid analogues.

[0048] The term “α-amino acid” refers to a molecule containing both an amino group and a carboxyl group bound to a carbon which is designated the α-carbon.

[0049] The term “μ-amino acid” refers to a molecule containing both an amino group and a carboxyl group in a β configuration.

[0050] The term “naturally-occurring amino acid” refers to any one of the twenty amino acids commonly found in peptides synthesized in nature, and known by the one letter abbreviations A, R, N, C, D, Q, E, G, H, I, L, K, M, F, P, S, T, W, Y and V.

[0051] The following table shows a summary of the properties of natural amino acids:

| | | | | Side-chain | |
|---|---|---|---|---|---|
| | 3-Letter | 1-Letter | Side-chain | charge | Hydropathy |
| Amino Acid | Code | Code | Polarity | (pH 7.4) | Index |
| Alanine | Ala | A | nonpolar | neutral | 1.8 |
| Arginine | Arg | R | polar | positive | −4.5 |
| Asparagine | Asn | N | polar | neutral | −3.5 |
| Aspartic acid | Asp | D | polar | negative | −3.5 |
| Cysteine | Cys | C | polar | neutral | 2.5 |
| Glutamic acid | Glu | E | polar | negative | −3.5 |
| Glutamine | Gln | Q | polar | neutral | −3.5 |
| Glycine | Gly | G | nonpolar | neutral | −0.4 |
| Histidine | His | H | polar | Positive | −3.2 |
| | | | | (10%) | |
| | | | | Neutral | |
| | | | | (90%) | |
| Isoleucine | ILe | I | nonpolar | neutral | 4.5 |
| Leucine | Leu | L | nonpolar | neutral | 3.8 |
| Lysine | Lys | K | polar | positive | −3.9 |
| Methionine | Met | M | nonpolar | neutral | 1.9 |
| Phenylalanine | Phe | F | nonpolar | neutral | 2.8 |
| Proline | Pro | P | nonpolar | neutral | −1.6 |
| Serine | Ser | S | polar | neutral | −0.8 |
| Threonine | Thr | T | polar | neutral | −0.7 |
| Tryptophan | Trp | W | nonpolar | neutral | −0.9 |
| Tyrosine | Tyr | Y | polar | neutral | −1.3 |
| Valine | Val | V | nonpolar | neutral | 4.2 |

[0052] “Hydrophobic amino acids” include small hydrophobic amino acids and large hydrophobic amino acids. “Small hydrophobic amino acids” are glycine, alanine, proline, and analogues thereof. “Large hydrophobic amino acids” are valine, leucine, isoleucine, phenylalanine, methionine, tryptophan, and analogues thereof. “Polar amino acids” are serine, threonine, asparagine, glutamine, cysteine, tyrosine, and analogues thereof. “Charged amino acids” are lysine, arginine, histidine, aspartate, glutamate, and analogues thereof.

[0053] The term “amino acid analogue” refers to a molecule which is structurally similar to an amino acid and which can be substituted for an amino acid in the formation of a peptidomimetic macrocycle. Amino acid analogues include, without limitation, β-amino acids and amino acids wherein the amino or carboxy group is substituted by a similarly reactive group (e.g., substitution of the primary amine with a secondary or tertiary amine, or substitution of the carboxy group with an ester).

[0054] The term “non-natural amino acid” refers to an amino acid which is not one of the twenty amino acids commonly found in peptides synthesized in nature, and known by the one letter abbreviations A, R, N, C, D, Q, E, G, H, I, L, K, M, F, P, S, T, W, Y and V. Non-natural amino acids or amino acid analogues include, without limitation, structures according to the following:

[chemical structure]

[chemical structure]

[chemical structure]

[0055] Amino acid analogues include β-amino acid analogues. Examples of β-amino acid analogues include, but are not limited to, the following: cyclic β-amino acid analogues; β-alanine; (R)-β-phenylalanine; (R)-1,2,3,4-tetrahydro-isoquinoline-3-acetic acid; (R)-3-amino-4-(1-naphthyl)-butyric acid; (R)-3-amino-4-(2,4-dichlorophenyl)butyric acid; (R)-3-amino-4-(2-chlorophenyl)-butyric acid; (R)-3-amino-4-(2-cyanophenyl)-butyric acid; (R)-3-amino-4-(2-fluorophenyl)-butyric acid; (R)-3-amino-4-(2-furyl)-butyric acid; (R)-3-amino-4-(2-methylphenyl)-butyric acid; (R)-3-amino-4-(2-naphthyl)-butyric acid; (R)-3-amino-4-(2-thienyl)-butyric acid; (R)-3-amino-4-(2-trifluoromethylphenyl)-butyric acid; (R)-3-amino-4-(3,4-dichlorophenyl)butyric acid; (R)-3-amino-4-(3,4-difluorophenyl)butyric acid; (R)-3-amino-4-(3-benzothienyl)-butyric acid; (R)-3-amino-4-(3-chlorophenyl)-butyric acid; (R)-3-amino-4-(3-cyanophenyl)-butyric acid; (R)-3-amino-4-(3-fluorophenyl)-butyric acid; (R)-3-amino-4-(3-methylphenyl)-butyric acid; (R)-3-amino-4-(3-pyridyl)-butyric acid; (R)-3-amino-4-(3-thienyl)-butyric acid; (R)-3-amino-4-(3-trifluoromethylphenyl)-butyric acid; (R)-3-amino-4-(4-bromophenyl)-butyric acid; (R)-3-amino-4-(4-chlorophenyl)-butyric acid; (R)-3-amino-4-(4-cyanophenyl)-butyric acid; (R)-3-amino-4-(4-fluorophenyl)-butyric acid; (R)-3-amino-4-(4-iodophenyl)-butyric acid; (R)-3-amino-4-(4-methylphenyl)-butyric acid; (R)-3-amino-4-(4-nitrophenyl)-butyric acid; (R)-3-amino-4-(4-pyridyl)-butyric acid; (R)-3-amino-4-(4-trifluoromethylphenyl)-butyric acid; (R)-3-amino-4-pentafluoro-phenylbutyric acid; (R)-3-amino-5-hexenoic acid; (R)-3-amino-5-hexynoic acid; (R)-3-amino-5-phenylpentanoic acid; (R)-3-amino-6-phenyl-5-hexenoic acid; (S)-1,2,3,4-tetrahydro-isoquinoline-3-acetic acid; (S)-3-amino-4-(1-naphthyl)-butyric acid; (S)-3-amino-4-(2,4-dichlorophenyl)butyric acid; (S)-3-amino-4-(2-chlorophenyl)-butyric acid; (S)-3-amino-4-(2-cyanophenyl)-butyric acid; (S)-3-amino-4-(2-fluorophenyl)-butyric acid; (S)-3-amino-4-(2-furyl)-butyric acid; (S)-3-amino-4-(2-methylphenyl)-butyric acid; (S)-3-amino-4-(2-naphthyl)-butyric acid; (S)-3-amino-4-(2-thienyl)-butyric acid; (S)-3-amino-4-(2-trifluoromethylphenyl)-butyric acid; (S)-3-amino-4-(3,4-dichlorophenyl)butyric acid; (S)-3-amino-4-(3,4-difluorophenyl)butyric acid; (S)-3-amino-4-(3-benzothienyl)-butyric acid; (S)-3-amino-4-(3-chlorophenyl)-butyric acid; (S)-3-amino-4-(3-cyanophenyl)-butyric acid; (S)-3-amino-4-(3-fluorophenyl)-butyric acid; (S)-3-amino-4-(3-methylphenyl)-butyric acid; (S)-3-amino-4-(3-pyridyl)-butyric acid; (S)-3-amino-4-(3-thienyl)-butyric acid; (S)-3-amino-4-(3-trifluoromethylphenyl)-butyric acid; (S)-3-amino-4-(4-bromophenyl)-butyric acid; (S)-3-amino-4-(4-chlorophenyl)-butyric acid; (S)-3-amino-4-(4-cyanophenyl)-butyric acid; (S)-3-amino-4-(4-fluorophenyl)-butyric acid; (S)-3-amino-4-(4-iodophenyl)-butyric acid; (S)-3-amino-4-(4-methylphenyl)-butyric acid; (S)-3-amino-4-(4-nitrophenyl)-butyric acid; (S)-3-amino-4-(4-pyridyl)-butyric acid; (S)-3-amino-4-(4-trifluoromethylphenyl)-butyric acid; (S)-3-amino-4-pentafluoro-phenylbutyric acid; (S)-3-amino-5-hexenoic acid; (S)-3-amino-5-hexynoic acid; (S)-3-amino-5-phenylpentanoic acid; (S)-3-amino-6-phenyl-5-hexenoic acid; 1,2,5,6-tetrahydropyridine-3-carboxylic acid; 1,2,5,6-tetrahydropyridine-4-carboxylic acid; 3-amino-3-(2-chlorophenyl)-propionic acid; 3-amino-3-(2-thienyl)-propionic acid; 3-amino-3-(3-bromophenyl)-propionic acid; 3-amino-3-(4-chlorophenyl)-propionic acid; 3-amino-3-(4-methoxyphenyl)-propionic acid; 3-amino-4,4,4-trifluoro-butyric acid; 3-aminoadipic acid; D-β-phenylalanine; β-leucine; L-β-homoalanine; L-β-homoaspartic acid γ-benzyl ester; L-β-homoglutamic acid δ-benzyl ester; L-β-homoisoleucine; L-β-homoleucine; L-β-homomethionine; L-β-homophenylalanine; L-β-homoproline; L-β-homotryptophan; L-β-homovaline; L-Nω-benzyloxycarbonyl-β-homolysine; Nω-L-β-homoarginine; O-benzyl-L-β-homohydroxyproline; O-benzyl-L-β-homoserine; O-benzyl-L-β-homothreonine; O-benzyl-L-β-homotyrosine; γ-trityl-L-β-homoasparagine; (R)-β-phenylalanine; L-β-homoaspartic acid γ-t-butyl ester; L-β-homoglutamic acid δ-t-butyl ester; L-Nω-β-homolysine; Nδ-trityl-L-β-homoglutamine; Nω-2,2,4,6,7-pentamethyl-dihydrobenzofuran-5-sulfonyl-L-β-homoarginine; O-t-butyl-L-β-homohydroxy-proline; O-t-butyl-L-β-homoserine; O-t-butyl-L-β-homothreonine; O-t-butyl-L-β-homotyrosine; 2-aminocyclopentane carboxylic acid; and 2-aminocyclohexane carboxylic acid.

[0056] Amino acid analogues include analogues of alanine, valine, glycine or leucine. Examples of amino acid analogues of alanine, valine, glycine, and leucine include, but are not limited to, the following: α-methoxyglycine; α-allyl-L-alanine; α-aminoisobutyric acid; α-methyl-leucine; β-(1-naphthyl)-D-alanine; β-(1-naphthyl)-L-alanine; β-(2-naphthyl)-D-alanine; β-(2-naphthyl)-L-alanine; β-(2-pyridyl)-D-alanine; β-(2-pyridyl)-L-alanine; β-(2-thienyl)-D-alanine; β-(2-thienyl)-L-alanine; β-(3-benzothienyl)-D-alanine; β-(3-benzothienyl)-L-alanine; β-(3-pyridyl)-D-alanine; β-(3-pyridyl)-L-alanine; β-(4-pyridyl)-D-alanine; β-(4-pyridyl)-L-alanine; β-chloro-L-alanine; β-cyano-L-alanine; β-cyclohexyl-D-alanine; β-cyclohexyl-L-alanine; β-cyclopenten-1-yl-alanine; β-cyclopentyl-alanine; β-cyclopropyl-L-Ala-OH.dicyclohexyl ammonium salt; β-t-butyl-D-alanine; β-t-butyl-L-alanine; γ-aminobutyric acid; L-α,β-diaminopropionic acid; 2,4-dinitro-phenylglycine; 2,5-dihydro-D-phenylglycine; 2-amino-4,4,4-trifluorobutyric acid; 2-fluoro-phenylglycine; 3-amino-4,4,4-trifluoro-butyric acid; 3-fluoro-valine; 4,4,4-trifluoro-valine; 4,5-dehydro-L-leu-OH.dicyclohexyl ammonium salt; 4-fluoro-D-phenylglycine; 4-fluoro-L-phenylglycine; 4-hydroxy-D-phenylglycine; 5,5,5-trifluoro-leucine; 6-aminohexanoic acid; cyclopentyl-D-Gly-OH,dicyclohexylammonium salt; cyclopentyl-Gly-OH.dicyclohexylammonium salt; D-α,β-diaminopropionic acid; D-α-aminobutyric acid; D-α-t-butylglycine; D-(2-thienyl)glycine; D-(3-thienyl)glycine; D-2-aminocaproic acid; D-2-indanylglycine; D-allylglycine.dicyclohexylammonium salt; D-cyclohexylglycine; D-norvaline; D-phenylglycine; β-aminobutyric acid; β-aminoisobutyric acid; (2-bromophenyl)glycine; (2-methoxyphenyl)glycine; (2-methylphenyl)glycine; (2-thiazoyl)glycine; (2-thienyl)glycine; 2-amino-3-(dimethylamino)-propionic acid; L-α,β-diaminopropionic acid; L-α-aminobutyric acid; L-α-t-butylglycine; L-(3-thienyl)glycine; L-2-amino-3-(dimethylamino)-propionic acid; L-2-aminocaproic acid dicyclohexyl-ammonium salt; L-2-indanylglycine; L-allylglycine dicyclohexyl ammonium salt; L-cyclohexylglycine; L-phenylglycine; L-propargylglycine; L-norvaline; N-α-aminomethyl-L-alanine; D-α,γ-diaminobutyric acid; L-α,γ-diaminobutyric acid; β-cyclopropyl-L-alanine; (N-β-(2,4-dinitrophenyl))-L-α,β-diaminopropionic acid; (N-β-1-(4,4-dimethyl-2,6-dioxocyclohex-1-ylidene)ethyl)-D-α,β-diaminopropionic acid; (N-β-1-(4,4-dimethyl-2,6-dioxocyclohex-1-ylidene)ethyl)-L-α,β-diaminopropionic acid; (N-β-4-methyltrityl)-L-α,β-diaminopropionic acid; (N-β-allyloxycarbonyl)-L-α,β-diaminopropionic acid; (N-γ-1-(4,4-dimethyl-2,6-dioxocyclohex-1-ylidene)ethyl)-D-α,γ-diaminobutyric acid; (N-γ-1-(4,4-dimethyl-2,6-dioxocyclohex-1-ylidene)ethyl)-L-α,γ-diaminobutyric acid; (N-γ-4-methyltrityl)-D-α,γ-diaminobutyric acid; (N-γ-4-methyltrityl)-L-α,γ-diaminobutyric acid; (N-γ-allyloxycarbonyl)-L-α,γ-diaminobutyric acid; D-α,γ-diaminobutyric acid; 4,5-dehydro-L-leucine; cyclopentyl-D-Gly-OH; cyclopentyl-Gly-OH; D-allylglycine; D-homocyclohexylalanine; L-1-pyrenylalanine; L-2-aminocaproic acid; L-allylglycine; L-homocyclohexylalanine; and N-(2-hydroxy-4-methoxy-Bzl)-Gly-OH.

[0057] Amino acid analogues include analogues of arginine or lysine. Examples of amino acid analogues of arginine and lysine include, but are not limited to, the following: citrulline; L-2-amino-3-guanidinopropionic acid; L-2-amino-3-ureidopropionic acid; L-citrulline; Lys(Me)₂-OH; Lys(N₃)—OH; Nδ-benzyloxycarbonyl-L-ornithine; Nω-nitro-D-arginine; Nω-nitro-L-arginine; α-methyl-ornithine; 2,6-diaminoheptanedioic acid; L-omithine; (Nδ-1-(4,4-dimethyl-2,6-dioxo-cyclohex-1-ylidene)ethyl)-D-ornithine; (Nδ-1-(4,4-dimethyl-2,6-dioxo-cyclohex-1-ylidene)ethyl)-L-omithine; (Nδ-4-methyltrityl)-D-ornithine; (Nδ-4-methyltrityl)-L-ornithine; D-ornithine; L-ornithine; Arg(Me)(Pbf)-OH; Arg(Me)₂-OH (asymmetrical); Arg(Me)₂-OH (symmetrical); Lys(ivDde)-OH; Lys(Me)₂-OH.HCl; Lys(Me₃)-OH chloride; Nω-nitro-D-arginine; and Nω-nitro-L-arginine.

[0058] Amino acid analogues include analogues of aspartic or glutamic acids. Examples of amino acid analogues of aspartic and glutamic acids include, but are not limited to, the following: α-methyl-D-aspartic acid; α-methyl-glutamic acid; α-methyl-L-aspartic acid; γ-methylene-glutamic acid; (N-γ-ethyl)-L-glutamine; [N-α-(4-aminobenzoyl)]-L-glutamic acid; 2,6-diaminopimelic acid; L-α-aminosuberic acid; D-2-aminoadipic acid; D-α-aminosuberic acid; α-aminopimelic acid; iminodiacetic acid; L-2-aminoadipic acid; threo-3-methyl-aspartic acid; γ-carboxy-D-glutamic acid γ,γ-di-t-butyl ester; γ-carboxy-L-glutamic acid γ,γ-di-t-butyl ester; Glu(OAll)-OH; L-Asu(OtBu)-OH; and pyroglutamic acid.

[0059] Amino acid analogues include analogues of cysteine and methionine. Examples of amino acid analogues of cysteine and methionine include, but are not limited to, Cys(farnesyl)-OH, Cys(farnesyl)-OMe, α-methyl-methionine, Cys(2-hydroxyethyl)-OH, Cys(3-aminopropyl)-OH, 2-amino-4-(ethylthio)butyric acid, buthionine, buthioninesulfoximine, ethionine, methionine methylsulfonium chloride, selenomethionine, cysteic acid, [2-(4-pyridyl)ethyl]-DL-penicillamine, [2-(4-pyridyl)ethyl]-L-cysteine, 4-methoxybenzyl-D-penicillamine, 4-methoxybenzyl-L-penicillamine, 4-methylbenzyl-D-penicillamine, 4-methylbenzyl-L-penicillamine, benzyl-D-cysteine, benzyl-L-cysteine, benzyl-DL-homocysteine, carbamoyl-L-cysteine, carboxyethyl-L-cysteine, carboxymethyl-L-cysteine, diphenylmethyl-L-cysteine, ethyl-L-cysteine, methyl-L-cysteine, t-butyl-D-cysteine, trityl-L-homocysteine, trityl-D-penicillamine, cystathionine, homocystine, L-homocystine, (2-aminoethyl)-L-cysteine, seleno-L-cystine, cystathionine, Cys(StBu)-OH, and acetamidomethyl-D-penicillamine.

[0060] Amino acid analogues include analogues of phenylalanine and tyrosine. Examples of amino acid analogues of phenylalanine and tyrosine include β-methyl-phenylalanine, β-hydroxyphenylalanine, α-methyl-3-methoxy-DL-phenylalanine, α-methyl-D-phenylalanine, α-methyl-L-phenylalanine, 1,2,3,4-tetrahydroisoquinoline-3-carboxylic acid, 2,4-dichloro-phenylalanine, 2-(trifluoromethyl)-D-phenylalanine, 2-(trifluoromethyl)-L-phenylalanine, 2-bromo-D-phenylalanine, 2-bromo-L-phenylalanine, 2-chloro-D-phenylalanine, 2-chloro-L-phenylalanine, 2-cyano-D-phenylalanine, 2-cyano-L-phenylalanine, 2-fluoro-D-phenylalanine, 2-fluoro-L-phenylalanine, 2-methyl-D-phenylalanine, 2-methyl-L-phenylalanine, 2-nitro-D-phenylalanine, 2-nitro-L-phenylalanine, 2;4;5-trihydroxy-phenylalanine, 3,4,5-trifluoro-D-phenylalanine, 3,4,5-trifluoro-L-phenylalanine, 3,4-dichloro-D-phenylalanine, 3,4-dichloro-L-phenylalanine, 3,4-difluoro-D-phenylalanine, 3,4-difluoro-L-phenylalanine, 3,4-dihydroxy-L-phenylalanine, 3,4-dimethoxy-L-phenylalanine, 3,5,3′-triiodo-L-thyronine, 3,5-diiodo-D-tyrosine, 3,5-diiodo-L-tyrosine, 3,5-diiodo-L-thyronine, 3-(trifluoromethyl)-D-phenylalanine, 3-(trifluoromethyl)-L-phenylalanine, 3-amino-L-tyrosine, 3-bromo-D-phenylalanine, 3-bromo-L-phenylalanine, 3-chloro-D-phenylalanine, 3-chloro-L-phenylalanine, 3-chloro-L-tyrosine, 3-cyano-D-phenylalanine, 3-cyano-L-phenylalanine, 3-fluoro-D-phenylalanine, 3-fluoro-L-phenylalanine, 3-fluoro-tyrosine, 3-iodo-D-phenylalanine, 3-iodo-L-phenylalanine, 3-iodo-L-tyrosine, 3-methoxy-L-tyrosine, 3-methyl-D-phenylalanine, 3-methyl-L-phenylalanine, 3-nitro-D-phenylalanine, 3-nitro-L-phenylalanine, 3-nitro-L-tyrosine, 4-(trifluoromethyl)-D-phenylalanine, 4-(trifluoromethyl)-L-phenylalanine, 4-amino-D-phenylalanine, 4-amino-L-phenylalanine, 4-benzoyl-D-phenylalanine, 4-benzoyl-L-phenylalanine, 4-bis(2-chloroethyl)amino-L-phenylalanine, 4-bromo-D-phenylalanine, 4-bromo-L-phenylalanine, 4-chloro-D-phenylalanine, 4-chloro-L-phenylalanine, 4-cyano-D-phenylalanine, 4-cyano-L-phenylalanine, 4-fluoro-D-phenylalanine, 4-fluoro-L-phenylalanine, 4-iodo-D-phenylalanine, 4-iodo-L-phenylalanine, homophenylalanine, thyroxine, 3,3-diphenylalanine, thyronine, ethyl-tyrosine, and methyl-tyrosine.

[0061] Amino acid analogues include analogues of proline. Examples of amino acid analogues of proline include, but are not limited to, 3,4-dehydro-proline, 4-fluoro-proline, cis-4-hydroxy-proline, thiazolidine-2-carboxylic acid, and trans-4-fluoro-proline.

[0062] Amino acid analogues include analogues of serine and threonine. Examples of amino acid analogues of serine and threonine include, but are not limited to, 3-amino-2-hydroxy-5-methylhexanoic acid, 2-amino-3-hydroxy-4-methylpentanoic acid, 2-amino-3-ethoxybutanoic acid, 2-amino-3-methoxybutanoic acid, 4-amino-3-hydroxy-6-methylheptanoic acid, 2-amino-3-benzyloxypropionic acid, 2-amino-3-benzyloxypropionic acid, 2-amino-3-ethoxypropionic acid, 4-amino-3-hydroxybutanoic acid, and α-methylserine.

[0063] Amino acid analogues include analogues of tryptophan. Examples of amino acid analogues of tryptophan include, but are not limited to, the following: α-methyl-tryptophan; β-(3-benzothienyl)-D-alanine; β-(3-benzothienyl)-L-alanine; 1-methyl-tryptophan; 4-methyl-tryptophan; 5-benzyloxy-tryptophan; 5-bromo-tryptophan; 5-chloro-tryptophan; 5-fluoro-tryptophan; 5-hydroxy-tryptophan; 5-hydroxy-L-tryptophan; 5-methoxy-tryptophan; 5-methoxy-L-tryptophan; 5-methyl-tryptophan; 6-bromo-tryptophan; 6-chloro-D-tryptophan; 6-chloro-tryptophan; 6-fluoro-tryptophan; 6-methyl-tryptophan; 7-benzyloxy-tryptophan; 7-bromo-tryptophan; 7-methyl-tryptophan; D-1,2,3,4-tetrahydro-norharman-3-carboxylic acid; 6-methoxy-1,2,3,4-tetrahydronorharman-1-carboxylic acid; 7-azatryptophan; L-1,2,3,4-tetrahydro-norharman-3-carboxylic acid; 5-methoxy-2-methyl-tryptophan; and 6-chloro-L-tryptophan.

[0064] In some embodiments, amino acid analogues are racemic. In some embodiments, the D isomer of the amino acid analogue is used. In some embodiments, the L isomer of the amino acid analogue is used. In other embodiments, the amino acid analogue comprises chiral centers that are in the R or S configuration. In still other embodiments, the amino group(s) of a β-amino acid analogue is substituted with a protecting group, e.g., tert-butyloxycarbonyl (BOC group), 9-fluorenylmethyloxycarbonyl (FMOC), tosyl, and the like. In yet other embodiments, the carboxylic acid functional group of a β-amino acid analogue is protected, e.g., as its ester derivative. In some embodiments the salt of the amino acid analogue is used.

[0065] A “non-essential” amino acid residue is a residue that can be altered from the wild-type sequence of a polypeptide without abolishing or substantially abolishing its essential biological or biochemical activity (e.g., receptor binding or activation). An “essential” amino acid residue is a residue that, when altered from the wild-type sequence of the polypeptide, results in abolishing or substantially abolishing the polypeptide's essential biological or biochemical activity.

[0066] A “conservative amino acid substitution” is one in which the amino acid residue is replaced with an amino acid residue having a similar side chain. Families of amino acid residues having similar side chains have been defined in the art. These families include amino acids with basic side chains (e.g., K, R, H), acidic side chains (e.g., D, E), uncharged polar side chains (e.g., G, N, Q, S, T, Y, C), nonpolar side chains (e.g., A, V, L, I, P, F, M, W), beta-branched side chains (e.g., T, V, I) and aromatic side chains (e.g., Y, F, W, H). Thus, a predicted nonessential amino acid residue in a polypeptide, e.g., is replaced with another amino acid residue from the same side chain family. Other examples of acceptable substitutions are substitutions based on isosteric considerations (e.g., norleucine for methionine) or other properties (e.g., 2-thienylalanine for phenylalanine, or 6-Cl-tryptophan for tryptophan).

[0067] The term “capping group” refers to the chemical moiety occurring at either the carboxy or amino terminus of the polypeptide chain of the subject peptidomimetic macrocycle. The capping group of a carboxy terminus includes an unmodified carboxylic acid (i.e. —COOH) or a carboxylic acid with a substituent. For example, the carboxy terminus can be substituted with an amino group to yield a carboxamide at the C-terminus. Various substituents include but are not limited to primary, secondary, and tertiary amines, including pegylated secondary amines. Representative secondary amine capping groups for the C-terminus include:

[chemical structure]

[0068] The capping group of an amino terminus includes an unmodified amine (i.e. —NH₂) or an amine with a substituent. For example, the amino terminus can be substituted with an acyl group to yield a carboxamide at the N-terminus. Various substituents include but are not limited to substituted acyl groups, including C₁-C₆ carbonyls, C₇-C₃₀ carbonyls, and pegylated carbamates. Representative capping groups for the N-terminus include, but are not limited to, 4-FBzl (4-fluoro-benzyl) and the following:

[chemical structure]

[0069] The term “member” as used herein in conjunction with macrocycles or macrocycle-forming linkers refers to the atoms that form or can form the macrocycle, and excludes substituent or side chain atoms. By analogy, cyclodecane, 1,2-difluoro-decane and 1,3-dimethyl cyclodecane are all considered ten-membered macrocycles as the hydrogen or fluoro substituents or methyl side chains do not participate in forming the macrocycle.

[0070] The symbol “ [symbol] ” when used as part of a molecular structure refers to a single bond or a trans or cis double bond.

[0071] The term “amino acid side chain” refers to a moiety attached to the α-carbon (or another backbone atom) in an amino acid. For example, the amino acid side chain for alanine is methyl, the amino acid side chain for phenylalanine is phenylmethyl, the amino acid side chain for cysteine is thiomethyl, the amino acid side chain for aspartate is carboxymethyl, the amino acid side chain for tyrosine is 4-hydroxyphenylmethyl, etc. Other non-naturally-occurring amino acid side chains are also included, for example, those that occur in nature (e.g., an amino acid metabolite) or those that are made synthetically (e.g., an α,α di-substituted amino acid).

[0072] The term “α,α di-substituted amino” acid refers to a molecule or moiety containing both an amino group and a carboxyl group bound to a carbon (the α-carbon) that is attached to two natural or non-natural amino acid side chains.

[0073] The term “polypeptide” encompasses two or more naturally- or non-naturally-occurring amino acids joined by a covalent bond (e.g., an amide bond). Polypeptides as described herein include full length proteins (e.g., fully processed proteins) as well as shorter amino acid sequences (e.g., fragments of naturally-occurring proteins or synthetic polypeptide fragments).

[0074] The term “first C-terminal amino acid” refers to the amino acid which is closest to the C-terminus. The term “second C-terminal amino acid” refers to the amino acid attached at the N-terminus of the first C-terminal amino acid.

[0075] The term “macrocyclization reagent” or “macrocycle-forming reagent” as used herein refers to any reagent which can be used to prepare a peptidomimetic macrocycle by mediating the reaction between two reactive groups. Reactive groups can be, for example, an azide and alkyne, in which case macrocyclization reagents include, without limitation, Cu reagents such as reagents which provide a reactive Cu(I) species, such as CuBr, CuI or CuOTf, as well as Cu(II) salts such as Cu(CO₂CH₃)₂, CuSO₄, and CuCl₂ that can be converted in situ to an active Cu(I) reagent by the addition of a reducing agent such as ascorbic acid or sodium ascorbate. Macrocyclization reagents can additionally include, for example, Ru reagents known in the art such as Cp*RuCl(PPh₃)₂, [Cp*RuCl]₄ or other Ru reagents which can provide a reactive Ru(II) species. In other cases, the reactive groups are terminal olefins. In such embodiments, the macrocyclization reagents or macrocycle-forming reagents are metathesis catalysts including, but not limited to, stabilized, late transition metal carbene complex catalysts such as Group VIII transition metal carbene catalysts. For example, such catalysts are Ru and Os metal centers having a +2 oxidation state, an electron count of 16 and pentacoordinated. In other examples, catalysts have W or Mo centers. In some embodiments, the reactive groups are thiol groups. In some embodiments, the macrocyclization reagent is, for example, a linker functionalized with two thiol-reactive groups such as halogen groups.

[0076] The term “halo” or “halogen” refers to fluorine, chlorine, bromine or iodine or a radical thereof.

[0077] The term “alkyl” refers to a hydrocarbon chain that is a straight chain or branched chain, containing the indicated number of carbon atoms. For example, C₁-C₁₀ indicates that the group has from 1 to 10 (inclusive) carbon atoms in it. In the absence of any numerical designation, “alkyl” is a chain (straight or branched) having 1 to 20 (inclusive) carbon atoms.

[0078] The term “alkylene” refers to a divalent alkyl (i.e., —R—).

[0079] The term “alkenyl” refers to a hydrocarbon chain that is a straight chain or branched chain having one or more carbon-carbon double bonds. The alkenyl moiety contains the indicated number of carbon atoms. For example, C₂-C₁₀ indicates that the group has from 2 to 10 (inclusive) carbon atoms. The term “lower alkenyl” refers to a C₂-C₆ alkenyl chain. In the absence of any numerical designation, “alkenyl” is a chain (straight or branched) having 2 to 20 (inclusive) carbon atoms.

[0080] The term “alkynyl” refers to a hydrocarbon chain that is a straight chain or branched chain having one or more carbon-carbon triple bonds. The alkynyl moiety contains the indicated number of carbon atoms. For example, C₂-C₁₀ indicates that the group has from 2 to 10 (inclusive) carbon atoms. The term “lower alkynyl” refers to a C₂-C₆ alkynyl chain. In the absence of any numerical designation, “alkynyl” is a chain (straight or branched) having 2 to 20 (inclusive) carbon atoms.

[0081] The term “aryl” refers to a 6-carbon monocyclic or 10-carbon bicyclic aromatic ring system wherein 0, 1, 2, 3, or 4 atoms of each ring are substituted by a substituent. Examples of aryl groups include phenyl, naphthyl and the like. The term “arylalkoxy” refers to an alkoxy substituted with aryl.

[0082] “Arylalkyl” refers to an aryl group, as defined above, wherein one of the aryl group's hydrogen atoms has been replaced with a C₁-C₅ alkyl group, as defined above. Representative examples of an arylalkyl group include, but are not limited to, 2-methylphenyl, 3-methylphenyl, 4-methylphenyl, 2-ethylphenyl, 3-ethylphenyl, 4-ethylphenyl, 2-propylphenyl, 3-propylphenyl, 4-propylphenyl, 2-butylphenyl, 3-butylphenyl, 4-butylphenyl, 2-pentylphenyl, 3-pentylphenyl, 4-pentylphenyl, 2-isopropylphenyl, 3-isopropylphenyl, 4-isopropylphenyl, 2-isobutylphenyl, 3-isobutylphenyl, 4-isobutylphenyl, 2-sec-butylphenyl, 3-sec-butylphenyl, 4-sec-butylphenyl, 2-t-butylphenyl, 3-t-butylphenyl and 4-t-butylphenyl.

[0083] “Arylamido” refers to an aryl group, as defined above, wherein one of the aryl group's hydrogen atoms has been replaced with one or more —C(O)NH₂ groups. Representative examples of an arylamido group include 2-C(O)NH₂-phenyl, 3-C(O)NH₂-phenyl, 4-C(O)NH₂-phenyl, 2-C(O)NH₂-pyridyl, 3-C(O)NH₂-pyridyl, and 4-C(O)NH₂-pyridyl.

[0084] “Alkylheterocycle” refers to a C₁-C₅ alkyl group, as defined above, wherein one of the C₁-C₅ alkyl group's hydrogen atoms has been replaced with a heterocycle. Representative examples of an alkylheterocycle group include, but are not limited to, —CH₂CH₂-morpholine, —CH₂CH₂-piperidine, —CH₂CH₂CH₂-morpholine, and —CH₂CH₂CH₂-imidazole.

[0085] “Alkylamido” refers to a C₁-C₅ alkyl group, as defined above, wherein one of the C₁-C₅ alkyl group's hydrogen atoms has been replaced with a —C(O)NH₂ group. Representative examples of an alkylamido group include, but are not limited to, —CH₂—C(O)NH₂, —CH₂CH₂—C(O)NH₂, —CH₂CH₂CH₂C(O)NH₂, —CH₂CH₂CH₂CH₂C(O)NH₂, —CH₂CH₂CH₂CH₂CH₂C(O)NH₂, —CH₂CH(C(O)NH₂)CH₃, —CH₂CH(C(O)NH₂)CH₂CH₃, —CH(C(O)NH₂)CH₂CH₃, —C(CH₃)₂CH₂C(O)NH₂, —CH₂—CH₂—NH—C(O)—CH₃, —CH₂—CH₂—NH—C(O)—CH₃—CH₃, and —CH₂—CH₂—NH—C(O)—CH═CH₂.

[0086] “Alkanol” refers to a C₁-C₅ alkyl group, as defined above, wherein one of the C₁-C₅ alkyl group's hydrogen atoms has been replaced with a hydroxyl group. Representative examples of an alkanol group include, but are not limited to, —CH₂OH, —CH₂CH₂OH, —CH₂CH₂CH₂OH, —CH₂CH₂CH₂CH₂OH, —CH₂CH₂CH₂ CH₂CH₂OH, —CH₂CH(OH)CH₃, —CH₂CH(OH)CH₂CH₃, —CH(OH)CH₃ and —C(CH₃)₂CH₂OH.

[0087] “Alkylcarboxy” refers to a C₁-C₅ alkyl group, as defined above, wherein one of the C₁-C₅ alkyl group's hydrogen atoms has been replaced with a —COOH group. Representative examples of an alkylcarboxy group include, but are not limited to, —CH₂COOH, —CH₂CH₂COOH, —CH₂CH₂CH₂COOH, —CH₂CH₂CH₂CH₂COOH, —CH₂CH(COOH)CH₃, —CH₂CH₂CH₂CH₂CH₂COOH, —CH₂CH(COOH)CH₂CH₃, —CH(COOH)CH₂CH₃ and —C(CH₃)₂CH₂COOH.

[0088] The term “cycloalkyl” as employed herein includes saturated and partially unsaturated cyclic hydrocarbon groups having 3 to 12 carbons, preferably 3 to 8 carbons, and more preferably 3 to 6 carbons, wherein the cycloalkyl group additionally is optionally substituted. Some cycloalkyl groups include, without limitation, cyclopropyl, cyclobutyl, cyclopentyl, cyclopentenyl, cyclohexyl, cyclohexenyl, cycloheptyl, and cyclooctyl.

[0089] The term “heteroaryl” refers to an aromatic 5-8 membered monocyclic, 8-12 membered bicyclic, or 11-14 membered tricyclic ring system having 1-3 heteroatoms if monocyclic, 1-6 heteroatoms if bicyclic, or 1-9 heteroatoms if tricyclic, said heteroatoms selected from O, N, or S (e.g., carbon atoms and 1-3, 1-6, or 1-9 heteroatoms of O, N, or S if monocyclic, bicyclic, or tricyclic, respectively), wherein 0, 1, 2, 3, or 4 atoms of each ring are substituted by a substituent. Examples of heteroaryl groups include pyridyl, furyl or furanyl, imidazolyl, benzimidazolyl, pyrimidinyl, thiophenyl or thienyl, quinolinyl, indolyl, thiazolyl, and the like.

[0090] The term “heteroarylalkyl” or the term “heteroaralkyl” refers to an alkyl substituted with a heteroaryl. The term “heteroarylalkoxy” refers to an alkoxy substituted with heteroaryl.

[0091] The term “heterocyclyl” refers to a nonaromatic 5-8 membered monocyclic, 8-12 membered bicyclic, or 11-14 membered tricyclic ring system having 1-3 heteroatoms if monocyclic, 1-6 heteroatoms if bicyclic, or 1-9 heteroatoms if tricyclic, said heteroatoms selected from O, N, or S (e.g., carbon atoms and 1-3, 1-6, or 1-9 heteroatoms of O, N, or S if monocyclic, bicyclic, or tricyclic, respectively), wherein 0, 1, 2 or 3 atoms of each ring are substituted by a substituent. Examples of heterocyclyl groups include piperazinyl, pyrrolidinyl, dioxanyl, morpholinyl, tetrahydrofuranyl, and the like.

[0092] The term “substituent” refers to a group replacing a second atom or group such as a hydrogen atom on any molecule, compound or moiety. Suitable substituents include, without limitation, halo, hydroxy, mercapto, oxo, nitro, haloalkyl, alkyl, alkaryl, aryl, aralkyl, alkoxy, thioalkoxy, aryloxy, amino, alkoxycarbonyl, amido, carboxy, alkanesulfonyl, alkylcarbonyl, and cyano groups.

[0093] In some embodiments, the compounds disclosed herein contain one or more asymmetric centers and thus occur as racemates and racemic mixtures, single enantiomers, individual diastereomers and diastereomeric mixtures. All such isomeric forms of these compounds are included unless expressly provided otherwise. In some embodiments, the compounds disclosed herein are also represented in multiple tautomeric forms, in such instances, the compounds include all tautomeric forms of the compounds described herein (e.g., if alkylation of a ring system results in alkylation at multiple sites, the disclosure includes all such reaction products). All such isomeric forms of such compounds are included unless expressly provided otherwise. All crystal forms of the compounds described herein are included unless expressly provided otherwise.

[0094] As used herein, the terms “increase” and “decrease” mean, respectively, to cause a statistically significantly (i.e., p<0.1) increase or decrease of at least 5%.

[0095] As used herein, the recitation of a numerical range for a variable is intended to convey that the variable is equal to any of the values within that range. Thus, for a variable which is inherently discrete, the variable is equal to any integer value within the numerical range, including the end-points of the range. Similarly, for a variable which is inherently continuous, the variable is equal to any real value within the numerical range, including the end-points of the range. As an example, and without limitation, a variable which is described as having values between 0 and 2 takes the values 0, 1 or 2 if the variable is inherently discrete, and takes the values 0.0, 0.1, 0.01, 0.001, or any other real values ≥0 and ≤2 if the variable is inherently continuous.

[0096] As used herein, unless specifically indicated otherwise, the word “or” is used in the inclusive sense of “and/or” and not the exclusive sense of “either/or”.

[0097] The term “on average” represents the mean value derived from performing at least three independent replicates for each data point.

[0098] The term “biological activity” encompasses structural and functional properties of a macrocycle. Biological activity is, for example, structural stability, alpha-helicity, affinity for a target, resistance to proteolytic degradation, cell penetrability, intracellular stability, in vivo stability, or any combination thereof.

[0099] The term “binding affinity” refers to the strength of a binding interaction, for example between a peptidomimetic macrocycle and a target. Binding affinity can be expressed, for example, as equilibrium dissociation constant (“K_{D}”), which is expressed in units which are a measure of concentration (e.g. M, mM, μM, nM etc). Numerically, binding affinity and K_{D} values vary inversely, such that a lower binding affinity corresponds to a higher K_{D} value, while a higher binding affinity corresponds to a lower K_{D} value. Where high binding affinity is desirable, “improved” binding affinity refers to higher binding affinity and therefore lower K_{D} values.

[0100] As used herein, the term “treatment” is defined as the application or administration of a therapeutic agent to a patient, or application or administration of a therapeutic agent to an isolated tissue or cell line from a patient, who has a disease, a symptom of disease or a predisposition toward a disease, with the purpose to cure, heal, alleviate, relieve, alter, remedy, ameliorate, improve or affect the disease, the symptoms of disease or the predisposition toward disease.

[0101] The terms “combination therapy” or “combined treatment” or in “combination” as used herein denotes any form of concurrent or parallel treatment with at least two distinct therapeutic agents.

[0102] The term “in vitro efficacy” refers to the extent to which a test compound, such as a peptidomimetic macrocycle, produces a beneficial result in an in vitro test system or assay. In vitro efficacy can be measured, for example, as an “IC₅₀” or “EC₅₀” value, which represents the concentration of the test compound which produces 50% of the maximal effect in the test system.

[0103] The term “ratio of in vitro efficacies” or “in vitro efficacy ratio” refers to the ratio of IC₅₀ or EC₅₀ values from a first assay (the numerator) versus a second assay (the denominator). Consequently, an improved in vitro efficacy ratio for Assay 1 versus Assay 2 refers to a lower value for the ratio expressed as IC₅₀(Assay 1)/IC₅₀(Assay 2) or alternatively as EC₅₀ (Assay 1)/EC₅₀ (Assay 2). This concept can also be characterized as “improved selectivity” in Assay 1 versus Assay 2, which can be due either to a decrease in the IC₅₀ or EC₅₀ value for Target 1 or an increase in the value for the IC₅₀ or EC₅₀ value for Target 2.

[0104] As used in the present application, “biological sample” means any fluid or other material derived from the body of a normal or diseased subject, such as blood, bone marrow, serum, plasma, lymph, urine, saliva, tears, cerebrospinal fluid, milk, amniotic fluid, bile, ascites fluid, pus, and the like. Also included within the meaning of the term “biological sample” is an organ or tissue extract and culture fluid in which any cells or tissue preparation from a subject has been incubated. The biological samples can be any samples from which genetic material can be obtained. Biological samples can also include solid or liquid cancer cell samples or specimens. The cancer cell sample can be a cancer cell tissue sample. In some embodiments, the cancer cell tissue sample can be obtained from surgically excised tissue. Non-limiting examples of sources of biological samples include fine needle aspiration, core needle biopsy, vacuum assisted biopsy, incisional biopsy, excisional biopsy, punch biopsy, shave biopsy or skin biopsy. In some cases, the biological samples comprise fine needle aspiration samples. In some embodiments, the biological samples comprise tissue samples, including, for example, excisional biopsy, incisional biopsy, or other biopsy. The biological samples can comprise a mixture of two or more sources; for example, fine needle aspirates and tissue samples. Tissue samples and cellular samples can also be obtained without invasive surgery, for example by punctuating the chest wall or the abdominal wall or from masses of breast, thyroid or other sites with a fine needle and withdrawing cellular material (fine needle aspiration biopsy). In some embodiments, a biological sample is a bone marrow aspirate sample. A biological sample can be obtained by methods known in the art such as the biopsy methods provided herein, swabbing, scraping, phlebotomy, or any other suitable method.

[0105] The term “solid tumor” or “solid cancer” as used herein refers to tumors that usually do not contain cysts or liquid areas. Solid tumors as used herein include sarcomas, carcinomas and lymphomas. In various embodiments, leukemia (cancer of blood) is not solid tumor.

[0106] The term “liquid cancer” as used herein refers to cancer cells that are present in body fluids, such as blood, lymph and bone marrow. Liquid cancers include leukemia, myeloma and liquid lymphomas. Liquid lymphomas include lymphomas that contain cysts or liquid areas. Liquid cancers as used herein do not include solid tumors, such as sarcomas and carcinomas or solid lymphomas that do not contain cysts or liquid areas.

### Treatment of Cancer

[0107] A method described herein can be used to treat cancer. Types of cancer that can be treated with a method of the disclosure include, without limitation, solid tumor cancers and liquid cancers. In some embodiments, a method of treating cancer described herein comprises administration of a peptidomimetic macrocycle in combination with a second pharmaceutically-active agent.

[0108] Solid tumor cancers that can be treated by the methods provided herein include, but are not limited to, sarcomas, carcinomas, and lymphomas. In specific embodiments, solid tumors that can be treated in accordance with the methods described include, but are not limited to, cancer of the breast, liver, neuroblastoma, head, neck, eye, mouth, throat, esophagus, esophagus, chest, bone, lung, kidney, colon, rectum or other gastrointestinal tract organs, stomach, spleen, skeletal muscle, subcutaneous tissue, prostate, breast, ovaries, testicles or other reproductive organs, skin, thyroid, blood, lymph nodes, kidney, liver, pancreas, and brain or central nervous system. Solid tumors that can be treated by the instant methods include tumors and/or metastasis (wherever located) other than lymphatic cancer, for example brain and other central nervous system tumors (including but not limited to tumors of the meninges, brain, spinal cord, cranial nerves and other parts of central nervous system, e.g. glioblastomas or medulloblastomas); head and/or neck cancer; breast tumors; circulatory system tumors (including but not limited to heart, mediastinum and pleura, and other intrathoracic organs, vascular tumors and tumor-associated vascular tissue); excretory system tumors (including but not limited to tumors of kidney, renal pelvis, ureter, bladder, other and unspecified urinary organs); gastrointestinal tract tumors (including but not limited to tumors of the esophagus, stomach, small intestine, colon, colorectal, rectosigmoid junction, rectum, anus and anal canal, tumors involving the liver and intrahepatic bile ducts, gall bladder, other and unspecified parts of biliary tract, pancreas, other and digestive organs); oral cavity tumors (including but not limited to tumors of lip, tongue, gum, floor of mouth, palate, and other parts of mouth, parotid gland, and other parts of the salivary glands, tonsil, oropharynx, nasopharynx, pyriform sinus, hypopharynx, and other sites in the lip, oral cavity and pharynx); reproductive system tumors (including but not limited to tumors of vulva, vagina, Cervix uteri, Corpus uteri, uterus, ovary, and other sites associated with female genital organs, placenta, penis, prostate, testis, and other sites associated with male genital organs); respiratory tract tumors (including but not limited to tumors of nasal cavity and middle ear, accessory sinuses, larynx, trachea, bronchus and lung, e.g. small cell lung cancer or non-small cell lung cancer); skeletal system tumors (including but not limited to tumors of bone and articular cartilage of limbs, bone articular cartilage and other sites); skin tumors (including but not limited to malignant melanoma of the skin, non-melanoma skin cancer, basal cell carcinoma of skin, squamous cell carcinoma of skin, mesothelioma, Kaposi's sarcoma); and tumors involving other tissues including peripheral nerves and autonomic nervous system, connective and soft tissue, retroperitoneum and peritoneum, eye and adnexa, thyroid, adrenal gland and other endocrine glands and related structures, secondary and unspecified malignant neoplasm of lymph nodes, secondary malignant neoplasm of respiratory and digestive systems and secondary malignant neoplasm of other sites.

[0109] In some examples, the solid tumor treated by the methods of the instant disclosure is pancreatic cancer, bladder cancer, colon cancer, liver cancer, colorectal cancer (colon cancer or rectal cancer), breast cancer, prostate cancer, renal cancer, hepatocellular cancer, lung cancer, ovarian cancer, cervical cancer, gastric cancer, esophageal cancer, head and neck cancer, melanoma, neuroendocrine cancers, CNS cancers, brain tumors, bone cancer, skin cancer, ocular tumor, choriocarcinoma (tumor of the placenta), sarcoma or soft tissue cancer.

[0110] In some examples, the solid tumor to be treated by the methods of the instant disclosure is selected bladder cancer, bone cancer, breast cancer, cervical cancer, CNS cancer, colon cancer, ocular tumor, renal cancer, liver cancer, lung cancer, pancreatic cancer, choriocarcinoma (tumor of the placenta), prostate cancer, sarcoma, skin cancer, soft tissue cancer or gastric cancer.

[0111] In some examples, the solid tumor treated by the methods of the instant disclosure is breast cancer. Non limiting examples of breast cancer that can be treated by the instant methods include ductal carcinoma in situ (DCIS or intraductal carcinoma), lobular carcinoma in situ (LCIS), invasive (or infiltrating) ductal carcinoma, invasive (or infiltrating) lobular carcinoma, inflammatory breast cancer, triple-negative breast cancer, paget disease of the nipple, phyllodes tumor (phyllodes tumor or cystosarcoma phyllodes), angiosarcoma, adenoid cystic (or adenocystic) carcinoma, low-grade adenosquamous carcinoma, medullary carcinoma, papillary carcinoma, tubular carcinoma, metaplastic carcinoma, micropapillary carcinoma, and mixed carcinoma.

[0112] In some examples, the solid tumor treated by the methods of the instant disclosure is bone cancer. Non limiting examples of bone cancer that can be treated by the instant methods include osteosarcoma, chondrosarcoma, the Ewing Sarcoma Family of Tumors (ESFTs).

[0113] In some examples, the solid tumor treated by the methods of the instant disclosure is skin cancer. Non limiting examples of skin cancer that can be treated by the instant methods include melanoma, basal cell skin cancer, and squamous cell skin cancer.

[0114] In some examples, the solid tumor treated by the methods of the instant disclosure is ocular tumor. Non limiting examples of ocular tumor that can be treated by the methods of the instant disclosure include ocular tumor is choroidal nevus, choroidal melanoma, choroidal metastasis, choroidal hemangioma, choroidal osteoma, iris melanoma, uveal melanoma, intraocular lymphoma, melanocytoma, metastasis retinal capillary hemangiomas, congenital hypertrophy of the RPE, RPE adenoma or retinoblastoma.

[0115] Liquid cancer cancers that can be treated by the methods provided herein include, but are not limited to, leukemias, myelomas, and liquid lymphomas. In specific embodiments, liquid cancers that can be treated in accordance with the methods described include, but are not limited to, liquid lymphomas, leukemias, and myelomas. Non-limiting examples of liquid lymphomas and leukemias that can be treated in accordance with the methods described include chronic lymphocytic leukemia/small lymphocytic lymphoma, B-cell prolymphocytic leukemia, lymphoplasmacytic lymphoma (such as Waldenstrom macroglobulinemia), splenic marginal zone lymphoma, plasma cell myeloma, plasmacytoma, monoclonal immunoglobulin deposition diseases, heavy chain diseases, extranodal marginal zone B cell lymphoma, also called malt lymphoma, nodal marginal zone B cell lymphoma (nmzl), follicular lymphoma, mantle cell lymphoma, diffuse large B cell lymphoma, mediastinal (thymic) large B cell lymphoma, intravascular large B cell lymphoma, primary effusion lymphoma, Burkitt lymphoma/leukemia, T cell prolymphocytic leukemia, T cell large granular lymphocytic leukemia, aggressive NK cell leukemia, adult T cell leukemia/lymphoma, extranodal NK/T cell lymphoma, nasal type, enteropathy-type T cell lymphoma, hepatosplenic T cell lymphoma, blastic NK cell lymphoma, mycosis fungoides/Sezary syndrome, primary cutaneous CD30-positive T cell lymphoproliferative disorders, primary cutaneous anaplastic large cell lymphoma, lymphomatoid papulosis, angioimmunoblastic T cell lymphoma, peripheral T cell lymphoma, unspecified, anaplastic large cell lymphoma, classical Hodgkin lymphomas (nodular sclerosis, mixed cellularity, lymphocyte-rich, lymphocyte depleted or not depleted), and nodular lymphocyte-predominant Hodgkin lymphoma.

[0116] Examples of liquid cancers include cancers involving hyperplastic/neoplastic cells of hematopoietic origin, e.g., arising from myeloid, lymphoid or erythroid lineages, or precursor cells thereof. Non-limiting examples of disorders include: acute leukemias, e.g., erythroblastic leukemia, and acute megakaryoblastic leukemia. Additional non-limiting examples of myeloid disorders include, but are not limited to, acute promyeloid leukemia (APML), acute myelogenous leukemia (AML), and chronic myelogenous leukemia (CML); lymphoid malignancies include, but are not limited to acute lymphoblastic leukemia (ALL), which includes B-lineage ALL and T-lineage ALL, chronic lymphocytic leukemia (CLL), prolymphocytic leukemia (PLL), multiple myeloma, hairy cell leukemia (HLL), and Waldenstrom's macroglobulinemia (WM). Additional forms of malignant liquid lymphomas include, but are not limited to non-Hodgkin lymphoma and variants thereof, adult T cell leukemia/lymphoma (ATL), cutaneous T-cell lymphoma (CTCL), peripheral T-cell lymphoma (PTCL), large granular lymphocytic leukemia (LGF), Hodgkin's disease, and Reed-Sternberg disease. For example, liquid cancers include, but are not limited to, acute lymphocytic leukemia (ALL); T-cell acute lymphocytic leukemia (T-ALL); anaplastic large cell lymphoma (ALCL); chronic myelogenous leukemia (CML); acute myeloid leukemia (AML); chronic lymphocytic leukemia (CLL); B-cell chronic lymphocytic leukemia (B-CLL); diffuse large B-cell lymphomas (DLBCL); hyper eosinophilia/chronic eosinophilia; and Burkitt's lymphoma.

[0117] In some embodiments, the cancer comprises an acute lymphoblastic leukemia; acute myeloid leukemia; AIDS-related cancers; AIDS-related lymphoma; chronic lymphocytic leukemia; chronic myelogenous leukemia; chronic myeloproliferative disorders; adult T cell leukemia/lymphoma (ATL); cutaneous T-cell lymphoma (CTCL); peripheral T-cell lymphoma (PTCL); Hodgkin lymphoma; multiple myeloma; multiple myeloma/plasma cell neoplasm; Non-Hodgkin lymphoma; or primary central nervous system (CNS) lymphoma. In some embodiments, the liquid cancer can be B-cell chronic lymphocytic leukemia, B-cell lymphoma-DLBCL, B-cell lymphoma-DLBCL-germinal center-like, B-cell lymphoma-DLBCL-activated B-cell-like, or Burkitt's lymphoma.

[0118] In some embodiments, a subject treated in accordance with the methods provided herein is a human who has or is diagnosed with cancer with a p53 deactivating mutation and/or lacking active p53. In some embodiments, a subject treated for cancer in accordance with the methods provided herein is a human predisposed or susceptible to cancer with a p53 deactivating mutation and/or lacking active p53. In some embodiments, a subject treated for cancer in accordance with the methods provided herein is a human at risk of developing cancer with a p53 deactivating mutation and/or lacking active p53. A p53 deactivating mutation in some examples can be a mutation in the DNA-binding domain of the p53 protein. In some examples, the p53 deactivating mutation can be a missense mutation. In various examples, the cancer can be determined to have one or more p53 deactivating mutations selected from mutations at one or more of residues R175, G245, R248, R249, R273, and R282. The presence of a p53 deactivating mutation and/or the lack of wild type p53 in the cancer can be determined by any suitable method known in art, for example by sequencing, array-based testing, RNA analysis and amplifications methods like PCR.

[0119] In certain embodiments, the human subject is refractory and/or intolerant to one or more other treatments of the cancer. In some embodiments, the human subject has had at least one unsuccessful prior treatment and/or therapy of the cancer.

[0120] In some embodiments, a subject treated for cancer in accordance with the methods provided herein is a human, who has or is diagnosed with a cancer. In other embodiments, a subject treated for cancer in accordance with the methods provided herein is a human, predisposed or susceptible to a cancer. In some embodiments, a subject treated for cancer in accordance with the methods provided herein is a human, at risk of developing a cancer.

[0121] In some embodiments, a subject treated for a cancer in accordance with the methods provided herein is a human, who has or is diagnosed with a cancer, determined to have a p53 deactivating mutation and/or lack wild type p53. In some embodiments, a subject treated for cancer in accordance with the methods provided herein is a human, predisposed or susceptible to a cancer, determined to have a p53 deactivating mutation and/or lack wild type p53. In some embodiments, a subject treated for cancer in accordance with the methods provided herein is a human, at risk of developing a tumor, determined to have a p53 deactivating mutation and/or expressing wild type p53. In some embodiments, a p53 deactivating mutation can lead to loss of (or a decrease in) the in vitro apoptotic activity of p53. Non-limiting examples of p53 deactivating mutations are shown in the following table:

| Mutation at position | Amino acid change |
|---|---|
| 62 | E62_W91del |
| 122 | V122X |
| 135 | C135S |
| 143 | V143A |
| 144 | Q144P |
| 146 | W146X |
| 157 | V157F |
| 158 | R158H |
| 163 | Y163N |
| 168 | H168Y |
| 173 | V173L |
| 175 | R175H |
| 175 | R175P |
| 175 | R175Q |
| 175 | R175S |
| 219 | P219H |
| 234 | Y234C |
| 234 | Y234H |
| 237 | M237I |
| 240 | S240R |
| 245 | G245C |
| 245 | G245S |
| 246 | M246I |
| 248 | R248Q |
| 248 | R248W |
| 249 | R249S |
| 272 | V272M |
| 273 | R273H |
| 274 | V274F |
| 279 | G279E |
| 280 | R280K |
| 281 | D281H |
| 282 | R282W |
| 306 | R306P |
| 308 | P300_L308del |
| 327 | P300_Y327del |
| 332 | D324_I332del |
| 337 | R337C |
| 344 | L344P |

The table above refers to the sequence of p53 shown in FIG. 1. Amino acid changes are reported as: the amino acid being substituted followed by the position of the amino acid being substituted in the wild type p53 sequence, followed by the amino acid used for substitution. For example, L344P, indicates that the lysine (K) at the 344 position in the wild type sequence is replaced by a proline (P).

[0122] In some embodiments, the subject treated for cancer in accordance with the methods provided herein is a human, who has or is diagnosed with a tumor that is p53 negative. In some embodiments, a subject treated for cancer in accordance with the methods provided herein is a human, predisposed or susceptible to a cancer that is p53 negative. In some embodiments, a subject treated for cancer in accordance with the methods provided herein is a human, at risk of developing a cancer that is p53 negative.

[0123] In some embodiments, the subject treated for cancer in accordance with the methods provided herein is a human, who has or is diagnosed with a tumor that expresses p53 with a partial loss of function mutation. In other embodiments, a subject treated for cancer in accordance with the methods provided herein is a human, predisposed or susceptible to a cancer that expresses p53 with partial loss of function mutation. In some embodiments, a subject treated for tumor in accordance with the methods provided herein is a human, at risk of developing a cancer that expresses p53 with partial loss of function mutation. In some embodiments, a partial loss of p53 function mutation can cause the mutant p53 to exhibit some level of function of normal p53, but to a lesser or slower extent. For example, a partial loss of p53 function can mean that the cells become arrested in cell division to a lesser or slower extent.

[0124] In some embodiments, the subject treated for cancer in accordance with the methods provided herein is a human, who has or is diagnosed with a tumor that expresses p53 with a copy loss mutation and a deactivating mutation. In some embodiments, a subject treated for cancer in accordance with the methods provided herein is a human, predisposed or susceptible to a tumor that expresses p53 with a copy loss mutation and a deactivating mutation. In some embodiments, a subject treated for cancer in accordance with the methods provided herein is a human, at risk of developing a tumor that expresses p53 with a copy loss mutation and a deactivating mutation.

[0125] In some embodiments, the subject treated for cancer in accordance with the methods provided herein is a human, who has or is diagnosed with a cancer that expresses p53 with a copy loss mutation. In other embodiments, a subject treated for cancer in accordance with the methods provided herein is a human, predisposed or susceptible to a tumor that expresses p53 with a copy loss mutation. In some embodiments, a subject treated for cancer in accordance with the methods provided herein is a human, at risk of developing a cancer that expresses p53 with a copy loss mutation.

[0126] In some embodiments, a subject treated for cancer in accordance with the methods provided herein is a human, who has or is diagnosed with a tumor, determined to have a dominant p53 deactivating mutation. Dominant p53 deactivating mutation or dominant negative mutation, as used herein, is a mutation wherein the mutated p53 inhibits or disrupt the activity of the wild-type p53 gene.

[0127] In some embodiments, a subject treated for cancer in accordance with the methods provided herein is a human with non-cancerous tissue comprising a functional p53 protein. In some embodiments, the non-cancerous tissue comprising a functional p53 protein is bone marrow or tissue of the digestive tract (i.e., digestive tract tissue). In some embodiments, the subject is a human lacking a p53 deactivating mutation and/or expressing wild type p53. A p53 deactivating mutation in some examples can be a mutation in a DNA-binding domain of the p53 protein. In some embodiments, the p53 deactivating mutation can be a missense mutation. In some embodiments, the bone marrow of the subject can be determined to lack one or more p53 deactivating mutations selected from mutations at one or more of residues R175, G245, R248, R249, R273, and R282. The lack of a p53 deactivating mutation and/or the presence of wild type p53 in a non-cancerous tissue of the subject can be determined by any suitable method, for example by sequencing, array-based testing, RNA analysis and amplifications methods such as PCR.

[0128] In some embodiments, the subject treated for cancer in accordance with the methods provided herein is a human with non-cancerous tissue (e.g., bone marrow or tissue of the digestive tract) that expresses p53 with one or more silent mutations. Silent mutations can be mutations that cause no change in the encoded p53 amino acid sequence.

[0129] In some embodiments, a subject treated for cancer in accordance with the methods provided herein is a human with non-cancerous tissue (e.g., bone marrow or tissue of the digestive tract) determined to lack a dominant p53 deactivating mutation.

[0130] In some embodiments, the subject treated for cancer in accordance with the methods provided herein is a human with non-cancerous tissue (e.g., bone marrow or tissue of the digestive tract) that expresses p53 with a partial loss of function mutation.

Methods of Detecting Wild Type p53 and/or p53 Mutations

[0131] In some embodiments, a subject with a cancer having a p53-deactivating mutations and non-cancerous tissue comprising functional p53 protein is a candidate for cancer treatment with a method disclosed herein. Cancer cells and/or non-cancerous tissue from a subject can be assayed in order to determine the presence or absence of p53-deactivating mutations and/or the expression of wild type p53 in cancer/non-cancerous tissue prior to treatment with a compound of the disclosure. In some embodiments, the non-cancerous tissue is bone marrow. In some embodiments, the non-cancerous tissue is tissue of the digestive tract.

[0132] The activity of the p53 pathway can be determined by the mutational status of genes involved in the p53 pathways, including, for example, AKT1, AKT2, AKT3, ALK, BRAF, CDK4, CDKN2A, DDR2, EGFR, ERBB2 (HER2), FGFR1, FGFR3, GNA11, GNQ, GNAS, KDR, KIT, KRAS, MAP2K1 (MEK1), MET, HRAS, NOTCH1, NRAS, NTRK2, PIK3CA, NF1, PTEN, RAC1, RB1, NTRK3, STK11, PIK3R1, TSC1, TSC2, RET, TP53, and VHL. Genes that modulate the activity of p53 can also be assessed, including, for example, kinases: ABL1, JAK1, JAAK2, JAK3; receptor tyrosine kinases: FLT3 and KIT; receptors: CSF3R, IL7R, MPL, and NOTCH1; transcription factors: BCOR, CEBPA, CREBBP, ETV6, GATA1, GATA2. MLL, KZF1, PAX5, RUNX1, STAT3, WT1, and TP53; epigenetic factors: ASXL1, DNMT3A, EZH2, KDM6A (UTX), SUZ12, TET2, PTPN11, SF3B1, SRSF2, U2AF35, and ZRSR2; RAS proteins: HRAS, KRAS, and NRAS; adaptors CBL and CBL-B; FBXW7, IDH1, IDH2, and NPM1.

[0133] Cancer cell samples can be obtained, for example, from solid or liquid tumors via primary or metastatic tumor resection (e.g. pneumonectomy, lobetomy, wedge resection, and craniotomy) primary or metastatic disease biopsy (e.g. transbronchial or needle core), pleural or ascites fluid (e.g. FFPE cell pellet), or macro-dissection of tumor rich areas (solid tumors).

[0134] To detect the p53 wild type gene and/or lack of p53 deactivation mutation in a cancerous tissue, cancerous tissue can be isolated from surrounding normal tissues. For example, the tissue can be isolated from paraffin or cryostat sections. Cancer cells can also be separated from normal cells by flow cytometry.

[0135] Non-cancerous tissue samples can be obtained, for example, from bone marrow, bone marrow aspirate, bone marrow clot, a bone marrow biopsy, digestive tract tissues such as intestinal lining, stomach lining, and mucous membranes; liver, spleen pancreas, skin, lungs, heart, kidney, gall bladder, appendix, brain, mouth, tongue, throat, ocular tissue, fat, muscle, and lymph nodes.

[0136] Various methods and assays for analyzing wild type p53 and/or p53 mutations are suitable for use in the methods of the disclosure. Non-limiting examples of assays include polymerase chain reaction (PCR), restriction fragment length polymorphism (RFLP), microarray, Southern blot, northern blot, western blot, eastern blot, hematoxylin and eosin (H&E) staining, microscopic assessment of tumors, DNA sequencing, RNA sequencing, next-generation DNA sequencing (NGS) (e.g. extraction, purification, quantification, and amplification of DNA, library preparation) immunohistochemistry, and fluorescent in situ hybridization (FISH).

[0137] A microarray allows a researcher to investigate multiple DNA sequences attached to a surface, for example, a DNA chip made of glass or silicon, or a polymeric bead or resin. The DNA sequences are hybridized with fluorescent or luminescent probes. The microarray can indicate the presence of oligonucleotide sequences in a sample based on hybridization of sample sequences to the probes, followed by washing and subsequent detection of the probes. Quantification of the fluorescent or luminescent signal indicates the presence of known oligonucleotide sequences in the sample.

[0138] A microarray allows a researcher to investigate multiple DNA sequences attached to a surface, for example, a DNA chip made of glass or silicon, or a polymeric bead or resin. The DNA sequences are hybridized with fluorescent or luminescent probes. The microarray can indicate the presence of oligonucleotide sequences in a sample based on hybridization of sample sequences to the probes, followed by washing and subsequent detection of the probes. Quantification of the fluorescent or luminescent signal indicates the presence of known oligonucleotide sequences in the sample.

[0139] In some embodiments, an assay comprises amplifying a biomolecule from a biological sample such as a bone marrow or cancer sample. The biomolecule can be a nucleic acid molecule, such as DNA or RNA. In some embodiments, the assay comprises circularization of a nucleic acid molecule, followed by digestion of the circularized nucleic acid molecule.

[0140] In some embodiments, the assay comprises contacting an organism, or a biochemical sample collected from an organism, such as a nucleic acid sample, with a library of oligonucleotides, such as PCR primers. The library can contain any number of oligonucleotide molecules. The oligonucleotide molecules can bind individual DNA or RNA motifs, or any combination of motifs described herein. The motifs can be any distance apart, and the distance can be known or unknown. In some embodiments, two or more oligonucleotides in the same library bind motifs a known distance apart in a parent nucleic acid sequence. Binding of the primers to the parent sequence can take place based on the complementarity of the primers to the parent sequence. Binding can take place, for example, under annealing, or under stringent conditions.

[0141] In some embodiments, the results of an assay are used to design a new oligonucleotide sequence for future use. In some embodiments, the results of an assay are used to design a new oligonucleotide library for future use. In some embodiments, the results of an assay are used to revise, refine, or update an existing oligonucleotide library for future use. For example, an assay can reveal that a previously-undocumented nucleic acid sequence is associated with the presence of a target material. This information can be used to design or redesign nucleic acid molecules and libraries.

[0142] In some embodiments, one or more nucleic acid molecules in a library comprise a barcode tag. In some embodiments, one or more of the nucleic acid molecules in a library comprise type I or type II restriction sites suitable for circularization and cutting an amplified sample nucleic acid sequence. Such primers can be used to circularize a PCR product and cut the PCR product to provide a product nucleic acid sequence with a sequence that is organized differently from the nucleic acid sequence native to the sample organism.

[0143] After a PCR experiment, the presence of an amplified sequence can be verified. Non-limiting examples of methods for finding an amplified sequence include DNA sequencing, whole transcriptome shotgun sequencing (WTSS, or RNA-seq), mass spectrometry (MS), microarray, pyrosequencing, column purification analysis, polyacrylamide gel electrophoresis, and index tag sequencing of a PCR product generated from an index-tagged primer.

[0144] In some embodiments, more than one nucleic acid sequence in the sample organism is amplified. Non-limiting examples of methods of separating different nucleic acid sequences in a PCR product mixture include column purification, high performance liquid chromatography (HPLC), HPLC/MS, polyacrylamide gel electrophoresis, size exclusion chromatography.

[0145] The amplified nucleic acid molecules can be identified by sequencing. Nucleic acid sequencing can be done on automated instrumentation. Sequencing experiments can be done in parallel to analyze tens, hundreds, or thousands of sequences simultaneously. Non-limiting examples of sequencing techniques follow.

[0146] In pyrosequencing, DNA is amplified within a water droplet containing a single DNA template bound to a primer-coated bead in an oil solution. Nucleotides are added to a growing sequence, and the addition of each base is evidenced by visual light.

[0147] Ion semiconductor sequencing detects the addition of a nucleic acid residue as an electrical signal associated with a hydrogen ion liberated during synthesis. A reaction well containing a template is flooded with the four types of nucleotide building blocks, one at a time. The timing of the electrical signal identifies which building block was added and identifies the corresponding residue in the template.

[0148] DNA nanoball uses rolling circle replication to amplify DNA into nanoballs. Unchained sequencing by ligation of the nanoballs reveals the DNA sequence.

[0149] In a reversible dyes approach, nucleic acid molecules are annealed to primers on a slide and amplified. Four types of fluorescent dye residues, each complementary to a native nucleobase, are added, the residue complementary to the next base in the nucleic acid sequence is added, and unincorporated dyes are rinsed from the slide. Four types of reversible terminator bases (RT-bases) are added, and non-incorporated nucleotides are washed away. Fluorescence indicates the addition of a dye residue, thus identifying the complementary base in the template sequence. The dye residue is chemically removed, and the cycle repeats.

[0150] Detection of the presence or absence of point mutations can be accomplished by molecular cloning of the p53 allele(s) present in the cancer cell tissue and sequencing that allele(s). Alternatively, the polymerase chain reaction can be used to amplify p53 gene sequences directly from a genomic DNA preparation from a biological sample such as bone marrow, tissue of the digestive tract, cancer cells, or cancer tissue. The DNA sequence of the amplified sequences can then be determined. Specific deletions of p53 genes can also be detected. For example, restriction fragment length polymorphism (RFLP) probes for the p53 gene or surrounding marker genes can be used to score loss of a p53 allele.

[0151] Loss of wild type p53 genes can also be detected on the basis of the loss of a wild type expression product of the p53 gene. Such expression products include both the mRNA as well as the p53 protein product itself. Point mutations can be detected by sequencing the mRNA directly or via molecular cloning of cDNA made from the mRNA. The sequence of the cloned cDNA can be determined using DNA sequencing techniques. The cDNA can also be sequenced via polymerase chain reaction (PCR).

[0152] Alternatively, mismatch detection can be used to detect the presence or absence of point mutations in the p53 gene or the mRNA product. The method can involve the use of a labeled riboprobe that is complementary to the human wild type p53 gene. The riboprobe and either mRNA or DNA isolated from the cancer cell tissue are annealed (hybridized) together and subsequently digested with the enzyme RNase A, which is able to detect some mismatches in a duplex RNA structure. If a mismatch is detected by RNase A, the enzyme cleaves at the site of the mismatch. Thus, when the annealed RNA preparation is separated on an electrophoretic gel matrix, if a mismatch has been detected and cleaved by RNase A, a RNA product is seen that is smaller than is the full-length duplex RNA for the riboprobe and the p53 mRNA or DNA. The riboprobe need not be the full length of the p53 mRNA or gene but can be a segment of either. If the riboprobe comprises only a segment of the p53 mRNA, then a number of these probes can be used to screen the whole mRNA sequence for mismatches.

[0153] In similar fashion, DNA probes can be used to detect the presence or absence mismatches, through enzymatic or chemical cleavage. Alternatively, mismatches can be detected by shifts in the electrophoretic mobility of mismatched duplexes relative to matched duplexes. With either riboprobes or DNA probes, the cellular mRNA or DNA, which might contain a mutation, can be amplified using PCR before hybridization.

[0154] DNA sequences of the p53 gene from a biological sample such as bone marrow, tissue of the digestive tract, cancer cells, or cancerous tissue, which have been amplified by use of polymerase chain reaction, can also be screened using allele-specific probes. These probes are nucleic acid oligomers, each of which contains a region of the p53 gene sequence harboring a known mutation. For example, one oligomer can be about 30 nucleotides in length, corresponding to a portion of the p53 gene sequence. At the position coding for the 175th codon of the p53 gene, the oligomer encodes an alanine, rather than the wild type codon valine. By use of a battery of such allele-specific probes, the PCR amplification products can be screened to identify the presence of a previously-identified mutation in the p53 gene. Hybridization of allele-specific probes with amplified p53 sequences can be performed, for example, on a nylon filter. Hybridization to a particular probe indicates the presence of the same mutation in the biological sample as in the allele-specific probe.

[0155] The identification of p53 gene structural changes in a biological sample such as bone marrow, tissue of the digestive tract, cancer cells, or cancerous tissue can be facilitated through the application of a diverse series of high resolution, high throughput microarray platforms. Essentially two types of array include those that carry PCR products from cloned nucleic acids (e.g. cDNA, BACs, cosmids) and those that use oligonucleotides. The methods can provide a way to survey genome wide DNA copy number abnormalities and expression levels to allow correlations between losses, gains and amplifications in cancer cells with genes that are over- and under-expressed in the same samples. The gene expression arrays that provide estimates of mRNA levels in biological samples have given rise to exon-specific arrays that can identify both gene expression levels, alternative splicing events and mRNA processing alterations.

[0156] Oligonucleotide arrays can be used to interrogate single nucleotide polymorphisms (SNPs) throughout the genome for linkage and association studies and these have been adapted to quantify copy number abnormalities and loss of heterozygosity events. DNA sequencing arrays can allow resequencing of chromosome regions, exomes, and whole genomes.

[0157] Single nucleotide polymorphism (SNP)-based arrays or other gene arrays or chips can determine the presence or absence of wild type p53 allele and the structure of mutations. SNPs can be synonymous or nonsynonymous substitutions. Synonymous SNP substitutions do not result in a change of amino acid in the protein due to the degeneracy of the genetic code, but can affect function in other ways. For example, a seemingly silent mutation in a gene that codes for a membrane transport protein can slow down translation, allowing the peptide chain to misfold, and produce a less functional mutant membrane transport protein. Nonsynonymous SNP substitutions can be missense substitutions or nonsense substitutions. Missense substitutions occur when a single base change results in change in amino acid sequence of the protein and malfunction thereof leads to disease. Nonsense substitutions occur when a point mutation results in a premature stop codon, or a nonsense codon in the transcribed mRNA, which results in a truncated and usually, nonfunctional, protein product. As SNPs are highly conserved throughout evolution and within a population, the map of SNPs serves as an excellent genotypic marker for research. A SNP array can be a useful tool to study the whole genome.

[0158] In addition, SNP-based arrays can be used for studying the Loss Of Heterozygosity (LOH). LOH is a form of allelic imbalance that can result from the complete loss of an allele or from an increase in copy number of one allele relative to the other. While other chip-based methods (e.g., comparative genomic hybridization) can detect only genomic gains or deletions, SNP-based arrays have the additional advantage of detecting copy number neutral LOH due to uniparental disomy (UPD). In UPD, one allele or whole chromosome from one parent are missing, and the other parental allele is reduplicated (uni-parental=from one parent, disomy=duplicated). In a disease setting, this occurrence can be pathologic when the wild type allele (e.g., from the mother) is missing and instead two copies of the heterozygous allele (e.g., from the father) are present. This usage of SNP-based arrays has a huge potential in cancer diagnostics as LOH is a prominent characteristic of most human cancers. SNP-based array technologies have shown that cancers (e.g. gastric cancer, liver cancer, etc.) and hematologic malignancies (ALL, MDS, CML etc) have a high rate of LOH due to genomic deletions or UPD and genomic gains. In the present disclosure, using high density SNP-based arrays to detect LOH can allow for the identification of pattern of allelic imbalance to determine the presence of wild type p53 allele.

[0159] Mutations of wild type p53 genes can also be detected on the basis of the mutation of a wild type expression product of the p53 gene. Such expression products include both the mRNA and the p53 protein product itself. Point mutations can be detected by sequencing the mRNA directly or via molecular cloning of cDNA made from the mRNA. The sequence of the cloned cDNA can be determined using DNA sequencing techniques. The cDNA can also be sequenced via the polymerase chain reaction (PCR). A panel of monoclonal antibodies can be used in which each of the epitopes involved in p53 functions are represented by a monoclonal antibody. Loss or perturbation of binding of a monoclonal antibody in the panel can indicate mutational alteration of the p53 protein and thus of the p53 gene itself. Mutant p53 genes or gene products can also be detected in body samples, including, for example, bone marrow, tissue of the digestive tract, cancer cells, cancerous tissues, serum, stool, urine, and sputum. The same techniques discussed above for detection of mutant p53 genes or gene products in tissues can be applied to other body samples.

[0160] Loss of wild type p53 genes can also be detected by screening for loss of wild type p53 protein function. Protein p53 binds to the SV40 large T antigen as well as to the adenovirus E1B antigen. Loss of the ability of the p53 protein to bind to either or both of these antigens indicates a mutational alteration in the protein and reflects a mutational alteration of the gene. Alternatively, a panel of monoclonal antibodies can be used in which each of the epitopes involved in p53 functions is represented by a monoclonal antibody. Loss or perturbation of binding of a monoclonal antibody in the panel would indicate mutational alteration of the p53 protein and thus of the p53 gene. Any method for detecting an altered p53 protein can be used to detect loss of wild type p53 genes.

[0161] Wild type p53 and/or p53 mutations in cancerous or non-cancerous tissue can be detected any time before, during, or after the administration of a peptidomimetic macrocycle and/or another pharmaceutically-active agent. In some embodiments, the detection is performed before administration of a peptidomimetic macrocycle or other pharmaceutically-active agent, for example about 5 years-1 month, 4 years-1 month, 3 years-1 month, 2 years-1 month, 1 years-1 month, 5 years-1 week, 4 years-1 week, 3 years-1 month, 2 years-1 week, 1 year-1 week, 5 years-1 day, 4 years-1 day, 3 years-1 days, 2 years-1 day, 1 year-1 day, 15 months-1 month, 15 months-1 week, 15 months-1 day, 12 months-1 month, 12 months-1 week, 12 months-1 day, 6 months-1 month, 6 months-1 week, 6 months-1 day, 3 months-1 month, 3 months-1 week, or 3 months-1 day prior to the first administration of the peptidomimetic macrocycle or other pharmaceutically-active agent. In some examples, wild type p53 and/or p53 mutations are detected up to 6 years, up to 5 years, up to 4 years, up to 3 years, up to 24 months, up to 23 months, up to 22 months, up to 21 months, up to 20 months, up to 19 months, up to 18 months, up to 17 months, up to 16 months, up to 15 months, up to 14 months, up to 13 months, up to 12 months, up to 11 months, up to 10 months, up to 9 months, up to 8 months, up to 7 months, up to 6 months, up to 5 months, up to 4 months, up to 3 months, up to 2 months, up to 1 months, up to 4 weeks (28 days), up to 3 weeks (21 days), up to 2 weeks (14 days), up to 1 week (7 days), up to 6 days, up to 5 days, up to 4 days, up to 3 days, up to 2 days or up to 1 day before the first administration of the peptidomimetic macrocycle or other pharmaceutically-active agent to the subject.

### Myelopreservation Agents

[0162] A method disclosed herein can comprise administration of a peptidomimetic macrocycle in combination with a second pharmaceutically-active agent. In some instances, the peptidomimetic macrocycle can serve as a myelopreservation agent. A myelopreservation agent can prevent, reduce, or reduce a likelihood of myelosuppressive side effects of a pharmaceutically-active agent. Myelosuppressive side effects can be due to cytotoxic effects of a pharmaceutically-active agent on bone marrow cells. Non-limiting examples of myelosuppressive side effects include anemia, leukopenia, neutropenia, thrombocytopenia, and pancytopenia. In some instances, cells undergoing cell cycle arrest are resistant to the cytotoxic effects of a pharmaceutically-active agent. Cell cycle arrest can be induced by, for example, activation of p53. In some embodiments, a method of treating cancer disclosed herein comprises inducing cell cycle arrest in bone marrow via p53 activation in order to reduce the myelosuppressive side effects of a pharmaceutically-active agent. p53 activation can be induced by, for example, inhibition of MDM2 and/or MDMX proteins via administration of a peptidomimetic macrocycle disclosed herein. In some embodiments, the peptidomimetic macrocycle binds to MDM2 and/or MDMX proteins. In some embodiments, the peptidomimetic macrocycle is administered at a dose that is less than a dose needed to induce apoptosis in a tissue such as bone marrow.

### Protection Against Drug-Induced Mucositis

[0163] In some embodiments, a peptidomimetic macrocycle disclosed herein can prevent, reduce, or reduce a likelihood of mucositis caused by a second pharmaceutically-active agent. Mucositis can be due to cytotoxic effects of a pharmaceutically-active agent on the cells lining the digestive tract. Cell death along the digestive tract can lead to thinning of the epithelium, resulting in mucosal destruction. In some instances, cells of the digestive tract undergoing cell cycle arrest are resistant to the cytotoxic effects of a pharmaceutically active agent (e.g., a chemotherapeutic agent). Cell cycle arrest can be induced by, for example, activation of p53. In some embodiments, a method of treating cancer disclosed herein comprises inducing cell cycle arrest in the digestive tract via p53 activation in order to reduce mucositis caused by a pharmaceutically-active agent. p53 activation can be induced by, for example, inhibition of MDM2 and/or MDMX proteins via administration of a peptidomimetic macrocycle. In some embodiments, the peptidomimetic macrocycle binds to MDM2 and/or MDMX proteins. In some embodiments, the peptidomimetic macrocycle is administered at a dose that is less than a dose needed to induce apoptosis in tissue such as digestive tract tissue.

### Peptidomimetic Macrocycles

[0164] In some embodiments, a peptidomimetic macrocycle has the Formula (I):

[chemical structure]

wherein:
[0165] each A, C, D, and E is independently a natural or non-natural amino acid or an amino acid analog, and each terminal D and E independently optionally includes a capping group;
[0166] each B is independently a natural or non-natural amino acid, an amino acid analog,

[chemical structure]

[—NH-L₃-CO—], [—NH-L₃-SO₂—], or [—NH-L₃-];
[0167] each R₁ and R₂ is independently —H, alkyl, alkenyl, alkynyl, arylalkyl, cycloalkyl, cycloalkylalkyl, heteroalkyl, or heterocycloalkyl, unsubstituted or substituted with halo-, or at least one of R₁ and R₂ forms a macrocycle-forming linker L′ connected to the alpha position of one of said D or E amino acids;
[0168] each R₃ is independently hydrogen, alkyl, alkenyl, alkynyl, arylalkyl, heteroalkyl, cycloalkyl, heterocycloalkyl, cycloalkylalkyl, aryl, or heteroaryl, optionally substituted with R₅;
[0169] each L and L′ is independently a macrocycle-forming linker of the formula -L₁-L₂-;
[0170] each L₁, L₂, and L₃ is independently alkylene, alkenylene, alkynylene, heteroalkylene, cycloalkylene, heterocycloalkylene, arylene, heteroarylene, or [—R₄—K—R₄-]n, each being optionally substituted with R₅;
[0171] each R₄ is independently alkylene, alkenylene, alkynylene, heteroalkylene, cycloalkylene, heterocycloalkylene, arylene, or heteroarylene;
[0172] each K is independently O, S, SO, SO₂, CO, CO₂, or CONR₃;
[0173] each R₅ is independently halogen, alkyl, —OR₆, —N(R₆)₂, —SR₆, —SOR₆, —SO₂R₆, —CO₂R₆, a fluorescent moiety, a radioisotope or a therapeutic agent;
[0174] each R₆ is independently —H, alkyl, alkenyl, alkynyl, arylalkyl, cycloalkylalkyl, heterocycloalkyl, a fluorescent moiety, a radioisotope or a therapeutic agent;
[0175] each R₇ is independently —H, alkyl, alkenyl, alkynyl, arylalkyl, cycloalkyl, heteroalkyl, cycloalkylalkyl, heterocycloalkyl, aryl, or heteroaryl, optionally substituted with R₅, or part of a cyclic structure with a D residue;
[0176] each R₈ is independently —H, alkyl, alkenyl, alkynyl, arylalkyl, cycloalkyl, heteroalkyl, cycloalkylalkyl, heterocycloalkyl, aryl, or heteroaryl, optionally substituted with R₅, or part of a cyclic structure with an E residue;
[0177] each v and w is independently an integer from 1-1000, for example 1-500, 1-200, 1-100, 1-50, 1-30, 1-20, or 1-10;
[0178] u is an integer from 1-10, for example 1-5, 1-3 or 1-2;
[0179] each x, y, and z is independently an integer from 0-10, for example the sum of x+y+z is 2, 3, or 6; and
[0180] n is an integer from 1-5.

[0181] In some embodiments, v and w are integers from 1-30. In some embodiments, w is an integer from 3-1000, for example 3-500, 3-200, 3-100, 3-50, 3-30, 3-20, or 3-10. In some embodiments, the sum of x+y+z is 3 or 6. In some embodiments, the sum of x+y+z is 3. In other embodiments, the sum of x+y+z is 6.

[0182] In some embodiments, w is an integer from 3-10, for example 3-6, 3-8, 6-8, or 6-10. In some embodiments, w is 3. In other embodiments, w is 6. In some embodiments, v is an integer from 1-1000, for example 1-500, 1-200, 1-100, 1-50, 1-30, 1-20, or 1-10. In some embodiments, v is 2.

[0183] In an embodiment of any of the Formulas described herein, L₁ and L₂, either alone or in combination, do not form a triazole or a thioether.

[0184] In one example, at least one of R₁ and R₂ is alkyl that is unsubstituted or substituted with halo-. In another example, both R₁ and R₂ are independently alkyl that is unsubstituted or substituted with halo-. In some embodiments, at least one of R₁ and R₂ is methyl. In other embodiments, R₁ and R₂ are methyl.

[0185] In some embodiments, x+y+z is at least 3. In other embodiments, x+y+z is 1, 2, 3, 4, 5, 6, 7, 8, 9 or 10. In some embodiments, the sum of x+y+z is 3 or 6. In some embodiments, the sum of x+y+z is 3. In other embodiments, the sum of x+y+z is 6. Each occurrence of A, B, C, D or E in a macrocycle or macrocycle precursor is independently selected. For example, a sequence represented by the formula [A]ₓ, when x is 3, encompasses embodiments wherein the amino acids are not identical, e.g. Gln-Asp-Ala as well as embodiments wherein the amino acids are identical, e.g. Gln-Gln-Gln. This applies for any value of x, y, or z in the indicated ranges. Similarly, when u is greater than 1, each compound can encompass peptidomimetic macrocycles which are the same or different. For example, a compound can comprise peptidomimetic macrocycles comprising different linker lengths or chemical compositions.

[0186] In some embodiments, the peptidomimetic macrocycle comprises a secondary structure which is an α-helix and R₈ is —H, allowing for intra-helical hydrogen bonding. In some embodiments, at least one of A, B, C, D or E is an α,α-disubstituted amino acid. In one example, B is an α,α-disubstituted amino acid. For instance, at least one of A, B, C, D or E is 2-aminoisobutyric acid. In other embodiments, at least one of A, B, C, D or E is

[chemical structure]

[0187] In other embodiments, the length of the macrocycle-forming linker L as measured from a first Cα to a second Cα is selected to stabilize a desired secondary peptide structure, such as an α-helix formed by residues of the peptidomimetic macrocycle including, but not necessarily limited to, those between the first Cα to a second Cα.

[0188] In some embodiments, peptidomimetic macrocycles are also provided of the formula:

[chemical structure]

wherein:
[0189] each of Xaa₃, Xaa₅, Xaa₆, Xaa₇, Xaa₈, Xaa₉, and Xaa₁₀ is individually an amino acid, wherein at least three of Xaa₃, Xaa₅, Xaa₆, Xaa₇, Xaa₈, Xaa₉, and Xaa₁₀ are the same amino acid as the amino acid at the corresponding position of the sequence Phe₃-X₄-His₅-Tyr₆-Trp₇-Ala₈-Gln₉-Leu₁₀-X₁₁-Ser₁₂ (SEQ ID NO: 1945), wherein each X is an amino acid;
[0190] each D and E is independently a natural or non-natural amino acid or an amino acid analog;
[0191] R₁ and R₂ are independently —H, alkyl, alkenyl, alkynyl, arylalkyl, cycloalkyl, cycloalkylalkyl, heteroalkyl, or heterocycloalkyl, unsubstituted or substituted with halo-; or at least one of R₁ and R₂ forms a macrocycle-forming linker L′ connected to the alpha position of one of said D or E amino acids;
[0192] each L and L′ is independently a macrocycle-forming linker of the formula -L₁-L₂-;
[0193] each L₁ and L₂ is independently alkylene, alkenylene, alkynylene, heteroalkylene, cycloalkylene, heterocycloalkylene, arylene, heteroarylene, or [—R₄—K—R₄—]ₙ, each being optionally substituted with R₅;
[0194] each R₄ is independently alkylene, alkenylene, alkynylene, heteroalkylene, cycloalkylene, heterocycloalkylene, arylene, or heteroarylene;
[0195] each K is independently O, S, SO, SO₂, CO, CO₂, or CONR₃;
[0196] each R₅ is independently halogen, alkyl, —OR₆, —N(R₆)₂, —SR₆, —SOR₆, —SO₂R₆, —CO₂R₆, a fluorescent moiety, a radioisotope or a therapeutic agent;
[0197] each R₆ is independently —H, alkyl, alkenyl, alkynyl, arylalkyl, cycloalkylalkyl, heterocycloalkyl, a fluorescent moiety, a radioisotope or a therapeutic agent;
[0198] R₇ is —H, alkyl, alkenyl, alkynyl, arylalkyl, cycloalkyl, heteroalkyl, cycloalkylalkyl, heterocycloalkyl, aryl, or heteroaryl, optionally substituted with R₅, or part of a cyclic structure with a D residue;
[0199] R₈ is —H, alkyl, alkenyl, alkynyl, arylalkyl, cycloalkyl, heteroalkyl, cycloalkylalkyl, heterocycloalkyl, aryl, or heteroaryl, optionally substituted with R₅, or part of a cyclic structure with an E residue;
[0200] v is an integer from 1-1000, for example 1-500, 1-200, 1-100, 1-50, 1-30, 1-20 or 1-10;
[0201] w is an integer from 3-1000, for example 3-500, 3-200, 3-100, 3-50, 3-30, 3-20, or 3-10; and
[0202] n is an integer from 1-5.

[0203] In some embodiments, v and w are integers from 1-30. In some embodiments, w is an integer from 3-1000, for example 3-500, 3-200, 3-100, 3-50, 3-30, 3-20, or 3-10. In some embodiments, the sum of x+y+z is 3 or 6. In some embodiments, the sum of x+y+z is 3. In other embodiments, the sum of x+y+z is 6.

[0204] In some embodiments of any of the Formulas described herein, at least three of Xaa₃, Xaa₅, Xaa₆, Xaa₇, Xaa₈, Xaa₉, and Xaa₁₀ are the same amino acid as the amino acid at the corresponding position of the sequence Phe₃-X₄-His5-Tyr₆-Trp₇-Ala₈-Gln₉-Leu₁₀-X₁-Ser₁₂ (SEQ ID NO: 1945). In other embodiments, at least four of Xaa₃, Xaa₅, Xaa₆, Xaa₇, Xaa₈, Xaa₉, and Xaa₁₀ are the same amino acid as the amino acid at the corresponding position of the sequence Phe₃-X₄-His₅-Tyr₆-Trp₇-Ala₈-Gln₉-Leu₁₀-X₁₁-Ser₁₂ (SEQ ID NO: 1945). In other embodiments, at least five of Xaa₃, Xaa₅, Xaa₆, Xaa₇, Xaa₈, Xaa₉, and Xaa₁₀ are the same amino acid as the amino acid at the corresponding position of the sequence Phe₃-X₄-His₅-Tyr₆-Trp₇-Ala₈-Gln₉-Leu₁₀-X₁₁-Ser₁₂ (SEQ ID NO: 1945). In other embodiments, at least six of Xaa₃, Xaa₅, Xaa₆, Xaa₇, Xaa₈, Xaa₉, and Xaa₁₀ are the same amino acid as the amino acid at the corresponding position of the sequence Phe₃-X₄-His5-Tyr₆-Trp₇-Ala₈-Gln₉-Leu₁₀-X₁₁-Ser₁₂ (SEQ ID NO: 1945). In other embodiments, at least seven of Xaa₃, Xaa₅, Xaa₆, Xaa₇, Xaa₈, Xaa₉, and Xaa₁₀ are the same amino acid as the amino acid at the corresponding position of the sequence Phe₃-X₄-His5-Tyr₆-Trp₇-Ala₈-Gln₉-Leu₁₀-X₁₁-Ser₁₂ (SEQ ID NO: 1945).

[0205] In some embodiments, a peptidomimetic macrocycle has the Formula:

[chemical structure]

wherein:
[0206] each of Xaa₃, Xaa₅, Xaa₆, Xaa₇, Xaa₈, Xaa₉, and Xaa₁₀ is individually an amino acid, wherein at least three of Xaa₃, Xaa₅, Xaa₆, Xaa₇, Xaa₈, Xaa₉, and Xaa₁₀ are the same amino acid as the amino acid at the corresponding position of the sequence Phe₃-X₄-Glu₅-Tyr₆-Trp₇-Ala₈-Gln₉-Leu₁₀/Cba₁₀-X₁₁-Ala₁₂ (SEQ ID NO: 1946), wherein each X is an amino acid;
[0207] each D is independently a natural or non-natural amino acid or an amino acid analog;
[0208] each E is independently a natural or non-natural amino acid or an amino acid analog, for example an amino acid selected from Ala (alanine), D-Ala (D-alanine), Aib (α-aminoisobutyric acid), Sar (N-methyl glycine), and Ser (serine);
[0209] R₁ and R₂ are independently —H, alkyl, alkenyl, alkynyl, arylalkyl, cycloalkyl, cycloalkylalkyl, heteroalkyl, or heterocycloalkyl, unsubstituted or substituted with halo-; or at least one of R₁ and R₂ forms a macrocycle-forming linker L′ connected to the alpha position of one of said D or E amino acids;
[0210] each L and L′ is independently a macrocycle-forming linker of the formula -L₁-L₂-;
[0211] each L₁ and L₂ is independently alkylene, alkenylene, alkynylene, heteroalkylene, cycloalkylene, heterocycloalkylene, arylene, heteroarylene, or [—R₄—K—R₄-]n, each being optionally substituted with R₅;
[0212] each R₄ is independently alkylene, alkenylene, alkynylene, heteroalkylene, cycloalkylene, heterocycloalkylene, arylene, or heteroarylene;
[0213] each K is independently O, S, SO, SO₂, CO, CO₂, or CONR₃;
[0214] each R₅ is independently halogen, alkyl, —OR₆, —N(R₆)₂, —SR₆, —SOR₆, —SO₂R₆, —CO₂R₆, a fluorescent moiety, a radioisotope or a therapeutic agent;
[0215] each R₆ is independently —H, alkyl, alkenyl, alkynyl, arylalkyl, cycloalkylalkyl, heterocycloalkyl, a fluorescent moiety, a radioisotope or a therapeutic agent;
[0216] R₇ is —H, alkyl, alkenyl, alkynyl, arylalkyl, cycloalkyl, heteroalkyl, cycloalkylalkyl, heterocycloalkyl, aryl, or heteroaryl, optionally substituted with R₅, or part of a cyclic structure with a D residue;
[0217] R₈ is —H, alkyl, alkenyl, alkynyl, arylalkyl, cycloalkyl, heteroalkyl, cycloalkylalkyl, heterocycloalkyl, aryl, or heteroaryl, optionally substituted with R₅, or part of a cyclic structure with an E residue;
[0218] v is an integer from 1-1000, for example 1-500, 1-200, 1-100, 1-50, 1-30, 1-20, or 1-10;
[0219] w is an integer from 3-1000, for example 3-500, 3-200, 3-100, 3-50, 3-30, 3-20, or 3-10; and
[0220] n is an integer from 1-5.

[0221] In some embodiments of the above Formula, at least three of Xaa₃, Xaa₅, Xaa₆, Xaa₇, Xaa₈, Xaa₉, and Xaa₁₀ are the same amino acid as the amino acid at the corresponding position of the sequence Phe₃-X₄-Glu₅-Tyr₆-Trp₇-Ala₈-Gln₉-Leu₁₀/Cba₁₀-X₁₁-Ala₁₂ (SEQ ID NO: 1946). In other embodiments of the above Formula, at least four of Xaa₃, Xaa₅, Xaa₆, Xaa₇, Xaa₈, Xaa₉, and Xaa₁₀ are the same amino acid as the amino acid at the corresponding position of the sequence Phe₃-X₄-Glu₅-Tyr₆-Trp₇-Ala₈-Gln₉-Leu₁₀/Cba₁₀-X₁₁-Ala₁₂ (SEQ ID NO: 1946). In other embodiments of the above Formula, at least five of Xaa₃, Xaa₅, Xaa₆, Xaa₇, Xaa₈, Xaa₉, and Xaa₁₀ are the same amino acid as the amino acid at the corresponding position of the sequence Phe₃-X₄-Glu₅-Tyr₆-Trp₇-Ala₈-Gln₉-Leu₁₀/Cba₁₀-X₁₁-Ala₁₂ (SEQ ID NO: 1946). In other embodiments of the above Formula, at least six of Xaa₃, Xaa₅, Xaa₆, Xaa₇, Xaa₈, Xaa₉, and Xaa₁₀ are the same amino acid as the amino acid at the corresponding position of the sequence Phe₃-X₄-Glu₅-Tyr₆-Trp₇-Ala₈-Gln₉-Leu₁₀/Cba₁₀-X11-Ala₁₂ (SEQ ID NO: 1946). In other embodiments of the above Formula, at least seven of Xaa₃, Xaa₅, Xaa₆, Xaa₇, Xaa₈, Xaa₉, and Xaa₁₀ are the same amino acid as the amino acid at the corresponding position of the sequence Phe₃-X₄-Glu₅-Tyr₆-Trp₇-Ala₈-Gln₉-Leu₁₀/Cba₁₀-X11-Ala₁₂ (SEQ ID NO: 1946).

[0222] In some embodiments, w is an integer from 3-10, for example 3-6, 3-8, 6-8, or 6-10. In some embodiments, w is 3. In other embodiments, w is 6. In some embodiments, v is an integer from 1-10. In some embodiments, v is 2.

[0223] In an embodiment of any of the Formulas described herein, L₁ and L₂, either alone or in combination, do not form a triazole or a thioether.

[0224] In one example, at least one of R₁ and R₂ is alkyl, unsubstituted or substituted with halo-. In another example, both R₁ and R₂ are independently alkyl, unsubstituted or substituted with halo-. In some embodiments, at least one of R₁ and R₂ is methyl. In other embodiments, R₁ and R₂ are methyl.

[0225] In some embodiments, x+y+z is at least 3. In other embodiments, x+y+z is 1, 2, 3, 4, 5, 6, 7, 8, 9 or 10. In some embodiments, the sum of x+y+z is 3 or 6. In some embodiments, the sum of x+y+z is 3. In other embodiments, the sum of x+y+z is 6. Each occurrence of A, B, C, D or E in a macrocycle or macrocycle precursor is independently selected. For example, a sequence represented by the formula [A]ₓ, when x is 3, encompasses embodiments wherein the amino acids are not identical, e.g. Gln-Asp-Ala as well as embodiments wherein the amino acids are identical, e.g. Gln-Gln-Gln. This applies for any value of x, y, or z in the indicated ranges. Similarly, when u is greater than 1, each compound can encompass peptidomimetic macrocycles which are the same or different. For example, a compound can comprise peptidomimetic macrocycles comprising different linker lengths or chemical compositions.

[0226] In some embodiments, the peptidomimetic macrocycle comprises a secondary structure which is an α-helix and R₈ is —H, allowing intra-helical hydrogen bonding. In some embodiments, at least one of A, B, C, D or E is an α,α-disubstituted amino acid. In one example, B is an α,α-disubstituted amino acid. For instance, at least one of A, B, C, D or E is 2-aminoisobutyric acid. In other embodiments, at least one of A, B, C, D or E is

[chemical structure]

[0227] In other embodiments, the length of the macrocycle-forming linker L as measured from a first Cα to a second Cα is selected to stabilize a desired secondary peptide structure, such as an α-helix formed by residues of the peptidomimetic macrocycle including, but not necessarily limited to, those between the first Cα to a second Cα.

[0228] In some embodiments, a peptidomimetic macrocycle of Formula (I) has Formula (Ia):

[chemical structure]

wherein:
[0229] each A, C, D, and E is independently a natural or non-natural amino acid or an amino acid analog;
[0230] each B is independently a natural or non-natural amino acid, amino acid analog,

[chemical structure]

[—NH-L₃-CO—], [—NH-L₃-SO₂—], or [—NH-L₃-];
[0231] each L is independently a macrocycle-forming linker;
[0232] each L′ is independently alkylene, alkenylene, alkynylene, heteroalkylene, cycloalkylene, heterocycloalkylene, arylene, or heteroarylene, each being optionally substituted with R₅, or a bond, or together with R₁ and the atom to which both R₁ and L′ are bound forms a ring;
[0233] each L″ is independently alkylene, alkenylene, alkynylene, heteroalkylene, cycloalkylene, heterocycloalkylene, arylene, or heteroarylene, each being optionally substituted with R₅, or a bond, or together with R₂ and the atom to which both R₂ and L″ are bound forms a ring;
[0234] each R₁ is independently —H, alkyl, alkenyl, alkynyl, arylalkyl, cycloalkyl, cycloalkylalkyl, heteroalkyl, or heterocycloalkyl, unsubstituted or substituted with halo-, or together with L′ and the atom to which both R₁ and L′ are bound forms a ring;
[0235] each R₂ is independently —H, alkyl, alkenyl, alkynyl, arylalkyl, cycloalkyl, cycloalkylalkyl, heteroalkyl, or heterocycloalkyl, unsubstituted or substituted with halo-, or together with L″ and the atom to which both R₂ and L″ are bound forms a ring;
[0236] each R₃ is independently hydrogen, alkyl, alkenyl, alkynyl, arylalkyl, heteroalkyl, cycloalkyl, heterocycloalkyl, cycloalkylalkyl, aryl, or heteroaryl, optionally substituted with R₅;
[0237] each L₃ is independently alkylene, alkenylene, alkynylene, heteroalkylene, cycloalkylene, heterocycloalkylene, arylene, heteroarylene, or [—R₄—K—R₄-]ₙ, each being optionally substituted with R₅;
[0238] each R₄ is independently alkylene, alkenylene, alkynylene, heteroalkylene, cycloalkylene, heterocycloalkylene, arylene, or heteroarylene;
[0239] each K is independently O, S, SO, SO₂, CO, CO₂, or CONR₃;
[0240] n is an integer from 1-5;
[0241] each R₅ is independently halogen, alkyl, —OR₆, —N(R₆)₂, —SR₆, —SOR₆, —SO₂R₆, —CO₂R₆, a fluorescent moiety, a radioisotope or a therapeutic agent;
[0242] each R₆ is independently —H, alkyl, alkenyl, alkynyl, arylalkyl, cycloalkylalkyl, heterocycloalkyl, a fluorescent moiety, a radioisotope or a therapeutic agent;
[0243] each R₇ is independently —H, alkyl, alkenyl, alkynyl, arylalkyl, cycloalkyl, heteroalkyl, cycloalkylalkyl, heterocycloalkyl, aryl, or heteroaryl, optionally substituted with R₅, or part of a cyclic structure with a D residue;
[0244] each R₈ is independently —H, alkyl, alkenyl, alkynyl, arylalkyl, cycloalkyl, heteroalkyl, cycloalkylalkyl, heterocycloalkyl, aryl, or heteroaryl, optionally substituted with R₅, or part of a cyclic structure with an E residue;
[0245] each v and w is independently an integer from 1-1000, for example 1-500, 1-200, 1-100, 1-50, 1-40, 1-25, 1-20, 1-15, or 1-10;
[0246] each x, y and z is independently an integer from 0-10, for example x+y+z is 2, 3, or 6; and
[0247] u is an integer from 1-10, for example 1-5, 1-3, or 1-2.

[0248] In some embodiments, L is a macrocycle-forming linker of the formula -L₁-L₂-. In some embodiments, each L₁ and L₂ is independently alkylene, alkenylene, alkynylene, heteroalkylene, cycloalkylene, heterocycloalkylene, arylene, heteroarylene, or [—R₄—K—R₄—]ₙ, each being optionally substituted with R₅; each R₄ is independently alkylene, alkenylene, alkynylene, heteroalkylene, cycloalkylene, heterocycloalkylene, arylene, or heteroarylene; each K is independently O, S, SO, SO₂, CO, CO₂, or CONR₃; and n is an integer from 1-5.

[0249] In one example, at least one of R₁ and R₂ is alkyl, unsubstituted or substituted with halo-. In another example, both R₁ and R₂ are independently alkyl, unsubstituted or substituted with halo-. In some embodiments, at least one of R₁ and R₂ is methyl. In other embodiments, R₁ and R₂ are methyl.

[0250] In some embodiments, x+y+z is at least 2. In other embodiments, x+y+z is 1, 2, 3, 4, 5, 6, 7, 8, 9, or 10. Each occurrence of A, B, C, D or E in a macrocycle or macrocycle precursor is independently selected. For example, a sequence represented by the formula [A]ₓ, when x is 3, encompasses embodiments where the amino acids are not identical, e.g. Gln-Asp-Ala as well as embodiments wherein the amino acids are identical, e.g. Gln-Gln-Gln. This applies for any value of x, y, or z in the indicated ranges. Similarly, when u is greater than 1, each compound can encompass peptidomimetic macrocycles which are the same or different. For example, a compound can comprise peptidomimetic macrocycles comprising different linker lengths or chemical compositions.

[0251] In some embodiments, the peptidomimetic macrocycle comprises a secondary structure which is a helix and R₈ is —H, allowing intra-helical hydrogen bonding. In some embodiments, at least one of A, B, C, D or E is an α,α-disubstituted amino acid. In one example, B is an α,α-disubstituted amino acid. For instance, at least one of A, B, C, D or E is 2-aminoisobutyric acid. In other embodiments, at least one of A, B, C, D or E is

[chemical structure]

[0252] In other embodiments, the length of the macrocycle-forming linker L as measured from a first Cα to a second Cα is selected to stabilize a desired secondary peptide structure, such as a helix formed by residues of the peptidomimetic macrocycle including, but not necessarily limited to, those between the first Cα to a second Cα.

[0253] In one embodiment, the peptidomimetic macrocycle of Formula (I) is:

[chemical structure]

wherein each R₁ and R₂ is independently —H, alkyl, alkenyl, alkynyl, arylalkyl, cycloalkyl, cycloalkylalkyl, heteroalkyl, or heterocycloalkyl, unsubstituted or substituted with halo-.

[0254] In related embodiments, the peptidomimetic macrocycle of Formula (I) is:

[chemical structure]

wherein each R₁′ and R₂′ is independently an amino acid.

[0255] In other embodiments, the peptidomimetic macrocycle of Formula (I) is a compound of any of the formulas shown below:

[chemical structure]

[chemical structure]

wherein “AA” represents any natural or non-natural amino acid side chain and “ [symbol] ” is [D]ᵥ, [E]_{w} as defined above, and n is an integer between 0 and 20, 50, 100, 200, 300, 400 or 500. In some embodiments, n is 0. In other embodiments, n is less than 50.

[0256] Non-limiting examples of embodiments of the macrocycle-forming linker L are shown below.

[chemical structure]

[0257] In other embodiments, D and/or E in the compound of Formula I are further modified to facilitate cellular uptake. In some embodiments, lipidating or PEGylating a peptidomimetic macrocycle facilitates cellular uptake, increases bioavailability, increases blood circulation, alters pharmacokinetics, decreases immunogenicity and/or decreases the needed frequency of administration.

[0258] In other embodiments, at least one of [D] and [E] in the compound of Formula I represents a moiety comprising an additional macrocycle-forming linker such that the peptidomimetic macrocycle comprises at least two macrocycle-forming linkers. In a specific embodiment, a peptidomimetic macrocycle comprises two macrocycle-forming linkers. In an embodiment, u is 2.

[0259] In some embodiments, the peptidomimetic macrocycles have the Formula (I):

[chemical structure]

wherein:
[0260] each A, C, D, and E is independently a natural or non-natural amino acid or an amino acid analog;
[0261] each B is independently a natural or non-natural amino acid, amino acid analog,

[chemical structure]

[—NH-L₃-CO—], [—NH-L₃-SO₂—], or [—NH-L₃-];
[0262] each R₁ and R₂ is independently —H, alkyl, alkenyl, alkynyl, arylalkyl, cycloalkyl, cycloalkylalkyl, heteroalkyl, or heterocycloalkyl, unsubstituted or substituted with halo-, or at least one of R₁ and R₂ forms a macrocycle-forming linker L′ connected to the alpha position of one of said D or E amino acids;
[0263] each R₃ is independently hydrogen, alkyl, alkenyl, alkynyl, arylalkyl, heteroalkyl, cycloalkyl, heterocycloalkyl, cycloalkylalkyl, aryl, or heteroaryl, optionally substituted with R₅;
[0264] each L and L′ is independently macrocycle-forming linker of the formula

[chemical structure]

[0265] wherein each L₁, L₂ and L₃ is independently alkylene, alkenylene, alkynylene, heteroalkylene, cycloalkylene, heterocycloalkylene, arylene, heteroarylene, or [—R₄—K—R₄-]ₙ, each being optionally substituted with R₅;
[0266] each R₄ is independently alkylene, alkenylene, alkynylene, heteroalkylene, cycloalkylene, heterocycloalkylene, arylene, or heteroarylene;
[0267] each K is independently O, S, SO, SO₂, CO, CO₂, or CONR₃;
[0268] each R₅ is independently halogen, alkyl, —OR₆, —N(R₆)₂, —SR₆, —SOR₆, —SO₂R₆, —CO₂R₆, a fluorescent moiety, a radioisotope or a therapeutic agent;
[0269] each R₆ is independently —H, alkyl, alkenyl, alkynyl, arylalkyl, cycloalkylalkyl, heterocycloalkyl, a fluorescent moiety, a radioisotope or a therapeutic agent; each R₇ is independently —H, alkyl, alkenyl, alkynyl, arylalkyl, cycloalkyl, heteroalkyl, cycloalkylalkyl, heterocycloalkyl, aryl, or heteroaryl, optionally substituted with R₅, or part of a cyclic structure with a D residue;
[0270] each R₈ is independently —H, alkyl, alkenyl, alkynyl, arylalkyl, cycloalkyl, heteroalkyl, cycloalkylalkyl, heterocycloalkyl, aryl, or heteroaryl, optionally substituted with R₅, or part of a cyclic structure with an E residue;
[0271] each v and w is independently an integer from 1-1000;
[0272] each x, y and z is independently an integer from 0-10;
[0273] us is an integer from 1-10; and
[0274] n is an integer from 1-5.

[0275] In one example, at least one of R₁ and R₂ is alkyl that is unsubstituted or substituted with halo-. In another example, both R₁ and R₂ are independently alkyl that are unsubstituted or substituted with halo-. In some embodiments, at least one of R₁ and R₂ is methyl. In other embodiments, R₁ and R₂ are methyl.

[0276] In some embodiments, x+y+z is at least 2. In other embodiments, x+y+z is 1, 2, 3, 4, 5, 6, 7, 8, 9 or 10. Each occurrence of A, B, C, D or E in a macrocycle or macrocycle precursor is independently selected. For example, a sequence represented by the formula [A]ₓ, when x is 3, encompasses embodiments where the amino acids are not identical, e.g. Gln-Asp-Ala as well as embodiments wherein the amino acids are identical, e.g. Gln-Gln-Gln. This applies for any value of x, y, or z in the indicated ranges.

[0277] In some embodiments, each of the first two amino acid represented by E comprises an uncharged side chain or a negatively charged side chain. In some embodiments, each of the first three amino acid represented by E comprises an uncharged side chain or a negatively charged side chain. In some embodiments, each of the first four amino acid represented by E comprises an uncharged side chain or a negatively charged side chain. In some embodiments, one or more or each of the amino acid that is i+1, i+2, i+3, i+4, i+5, and/or i+6 with respect to Xaa₁₃ represented by E comprises an uncharged side chain or a negatively charged side chain.

[0278] In some embodiments, the first C-terminal amino acid and/or the second C-terminal amino acid represented by E comprise a hydrophobic side chain. For example, the first C-terminal amino acid and/or the second C-terminal amino acid represented by E comprises a hydrophobic side chain, for example a small hydrophobic side chain. In some embodiments, the first C-terminal amino acid, the second C-terminal amino acid, and/or the third C-terminal amino acid represented by E comprise a hydrophobic side chain. For example, the first C-terminal amino acid, the second C-terminal amino acid, and/or the third C-terminal amino acid represented by E comprises a hydrophobic side chain, for example a small hydrophobic side chain. In some embodiments, one or more or each of the amino acid that is i+1, i+2, i+3, i+4, i+5, and/or i+6 with respect to Xaa₁₃ represented by E comprises an uncharged side chain or a negatively charged side chain.

[0279] In some embodiments, w is between 1 and 1000. For example, the first amino acid represented by E comprises a small hydrophobic side chain. In some embodiments, w is between 2 and 1000. For example, the second amino acid represented by E comprises a small hydrophobic side chain. In some embodiments, w is between 3 and 1000. For example, the third amino acid represented by E comprises a small hydrophobic side chain. For example, the third amino acid represented by E comprises a small hydrophobic side chain. In some embodiments, w is between 4 and 1000. In some embodiments, w is between 5 and 1000. In some embodiments, w is between 6 and 1000. In some embodiments, w is between 7 and 1000. In some embodiments, w is between 8 and 1000.

[0280] In some embodiments, the peptidomimetic macrocycle comprises a secondary structure which is a helix and R₈ is —H, allowing intra-helical hydrogen bonding. In some embodiments, at least one of A, B, C, D or E is an α,α-disubstituted amino acid. In one example, B is an α,α-disubstituted amino acid. For instance, at least one of A, B, C, D or E is 2-aminoisobutyric acid. In other embodiments, at least one of A, B, C, D or E is

[chemical structure]

[0281] In other embodiments, the length of the macrocycle-forming linker L as measured from a first Cα to a second Cα is selected to stabilize a desired secondary peptide structure, such as a helix formed by residues of the peptidomimetic macrocycle including, but not necessarily limited to, those between the first Cα to a second Cα.

[0282] In some embodiments, L is a macrocycle-forming linker of the formula

[chemical structure]

[0283] In some embodiments, L is a macrocycle-forming linker of the formula

[chemical structure]

or a tautomer thereof.

[0284] Non-limiting examples of embodiments of the macrocycle-forming linker L are shown below:

[chemical structure]

[chemical structure]

[chemical structure]

[0285] Amino acids which are used in the formation of triazole crosslinkers are represented according to the legend indicated below. Stereochemistry at the alpha position of each amino acid is S unless otherwise indicated. For azide amino acids, the number of carbon atoms indicated refers to the number of methylene units between the alpha carbon and the terminal azide. For alkyne amino acids, the number of carbon atoms indicated is the number of methylene units between the alpha position and the triazole moiety plus the two carbon atoms within the triazole group derived from the alkyne.

| | |
|---|---|
| $5a5 | Alpha-Me alkyne 1,5 triazole (5 carbon) |
| $5n3 | Alpha-Me azide 1,5 triazole (3 carbon) |
| $4rn6 | Alpha-Me R-azide 1,4 triazole (6 carbon) |
| $4a5 | Alpha-Me alkyne 1,4 triazole (5 carbon) |

[0286] In some embodiments, any of the macrocycle-forming linkers described herein can be used in any combination with any of the sequences shown in Table 1, Table 1a, Table 1b, Table 1c, Table 2a, Table 2b, Table 3, or Table 3a and also with any of the R— substituents indicated herein.

[0287] In some embodiments, the peptidomimetic macrocycle comprises at least one α-helix motif. For example, A, B and/or C in the compound of Formula I include one or more α-helices. As a general matter, α-helices include between 3 and 4 amino acid residues per turn. In some embodiments, the α-helix of the peptidomimetic macrocycle includes 1 to 5 turns and, therefore, 3 to 20 amino acid residues. In specific embodiments, the α-helix includes 1 turn, 2 turns, 3 turns, 4 turns, or 5 turns. In some embodiments, the macrocycle-forming linker stabilizes an α-helix motif included within the peptidomimetic macrocycle. Thus, in some embodiments, the length of the macrocycle-forming linker L from a first Cα to a second Cα is selected to increase the stability of an α-helix.

[0288] In some embodiments, the macrocycle-forming linker spans from 1 turn to 5 turns of the α-helix. In some embodiments, the macrocycle-forming linker spans approximately 1 turn, 2 turns, 3 turns, 4 turns, or 5 turns of the α-helix. In some embodiments, the length of the macrocycle-forming linker is approximately 5 Å to 9 Å per turn of the α-helix, or approximately 6 Å to 8 Å per turn of the α-helix.

[0289] Where the macrocycle-forming linker spans approximately 1 turn of an α-helix, the length is equal to approximately 5 carbon-carbon bonds to 13 carbon-carbon bonds, approximately 7 carbon-carbon bonds to 11 carbon-carbon bonds, or approximately 9 carbon-carbon bonds. Where the macrocycle-forming linker spans approximately 2 turns of an α-helix, the length is equal to approximately 8 carbon-carbon bonds to 16 carbon-carbon bonds, approximately 10 carbon-carbon bonds to 14 carbon-carbon bonds, or approximately 12 carbon-carbon bonds. Where the macrocycle-forming linker spans approximately 3 turns of an α-helix, the length is equal to approximately 14 carbon-carbon bonds to 22 carbon-carbon bonds, approximately 16 carbon-carbon bonds to 20 carbon-carbon bonds, or approximately 18 carbon-carbon bonds. Where the macrocycle-forming linker spans approximately 4 turns of an α-helix, the length is equal to approximately 20 carbon-carbon bonds to 28 carbon-carbon bonds, approximately 22 carbon-carbon bonds to 26 carbon-carbon bonds, or approximately 24 carbon-carbon bonds. Where the macrocycle-forming linker spans approximately 5 turns of an α-helix, the length is equal to approximately 26 carbon-carbon bonds to 34 carbon-carbon bonds, approximately 28 carbon-carbon bonds to 32 carbon-carbon bonds, or approximately 30 carbon-carbon bonds. Where the macrocycle-forming linker spans approximately 1 turn of an α-helix, the linkage contains approximately 4 atoms to 12 atoms, approximately 6 atoms to 10 atoms, or approximately 8 atoms. Where the macrocycle-forming linker spans approximately 2 turns of the α-helix, the linkage contains approximately 7 atoms to 15 atoms, approximately 9 atoms to 13 atoms, or approximately 11 atoms. Where the macrocycle-forming linker spans approximately 3 turns of the α-helix, the linkage contains approximately 13 atoms to 21 atoms, approximately 15 atoms to 19 atoms, or approximately 17 atoms. Where the macrocycle-forming linker spans approximately 4 turns of the α-helix, the linkage contains approximately 19 atoms to 27 atoms, approximately 21 atoms to 25 atoms, or approximately 23 atoms. Where the macrocycle-forming linker spans approximately 5 turns of the α-helix, the linkage contains approximately 25 atoms to 33 atoms, approximately 27 atoms to 31 atoms, or approximately 29 atoms.

[0290] Where the macrocycle-forming linker spans approximately 1 turn of the α-helix, the resulting macrocycle forms a ring containing approximately 17 members to 25 members, approximately 19 members to 23 members, or approximately 21 members. Where the macrocycle-forming linker spans approximately 2 turns of the α-helix, the resulting macrocycle forms a ring containing approximately 29 members to 37 members, approximately 31 members to 35 members, or approximately 33 members. Where the macrocycle-forming linker spans approximately 3 turns of the α-helix, the resulting macrocycle forms a ring containing approximately 44 members to 52 members, approximately 46 members to 50 members, or approximately 48 members. Where the macrocycle-forming linker spans approximately 4 turns of the α-helix, the resulting macrocycle forms a ring containing approximately 59 members to 67 members, approximately 61 members to 65 members, or approximately 63 members. Where the macrocycle-forming linker spans approximately 5 turns of the α-helix, the resulting macrocycle forms a ring containing approximately 74 members to 82 members, approximately 76 members to 80 members, or approximately 78 members.

[0291] In other embodiments, provided are peptidomimetic macrocycles of Formula (II) or (IIa):

[chemical structure]

wherein:
[0292] each A, C, D, and E is independently a natural or non-natural amino acid or an amino acid analog, and the terminal D and E independently optionally include a capping group;
[0293] each B is independently a natural or non-natural amino acid, amino acid analog,

[chemical structure]

[—NH-L₃-CO—], [—NH-L₃-SO₂—], or [—NH-L₃-];
[0294] each R₁ and R₂ is independently —H, alkyl, alkenyl, alkynyl, arylalkyl, cycloalkyl, cycloalkylalkyl, heteroalkyl, or heterocycloalkyl, unsubstituted or substituted with halo-; or at least one of R₁ and R₂ forms a macrocycle-forming linker L′ connected to the alpha position of one of said D or E amino acids;
[0295] each R₃ is independently hydrogen, alkyl, alkenyl, alkynyl, arylalkyl, heteroalkyl, cycloalkyl, heterocycloalkyl, cycloalkylalkyl, aryl, or heteroaryl, optionally substituted with R₅;
[0296] each L and L′ is a macrocycle-forming linker of the formula -L₁-L₂-;
[0297] each L₁, L₂, and L₃ is independently alkylene, alkenylene, alkynylene, heteroalkylene, cycloalkylene, heterocycloalkylene, arylene, heteroarylene, or [—R₄—K—R₄-]ₙ, each being optionally substituted with R₅;
[0298] each R₄ is independently alkylene, alkenylene, alkynylene, heteroalkylene, cycloalkylene, heterocycloalkylene, arylene, or heteroarylene;
[0299] each K is independently O, S, SO, SO₂, CO, CO₂, or CONR₃;
[0300] each R₅ is independently halogen, alkyl, —OR₆, —N(R₆)₂, —SR₆, —SOR₆, —SO₂R₆, —CO₂R₆, a fluorescent moiety, a radioisotope or a therapeutic agent;
[0301] each R₆ is independently —H, alkyl, alkenyl, alkynyl, arylalkyl, cycloalkylalkyl, heterocycloalkyl, a fluorescent moiety, a radioisotope or a therapeutic agent;
[0302] each R₇ is independently —H, alkyl, alkenyl, alkynyl, arylalkyl, cycloalkyl, heteroalkyl, cycloalkylalkyl, heterocycloalkyl, aryl, or heteroaryl, optionally substituted with R₅;
[0303] each v and w is independently an integer from 1-1000;
[0304] u is an integer from 1-10;
[0305] each x, y, and z is independently integers from 0-10; and
[0306] n is an integer from 1-5.

[0307] In one example, L₁ and L₂, either alone or in combination, do not form a triazole or a thioether.

[0308] In one example, at least one of R₁ and R₂ is alkyl, unsubstituted or substituted with halo-. In another example, both R₁ and R₂ are independently alkyl, unsubstituted or substituted with halo-. In some embodiments, at least one of R₁ and R₂ is methyl. In other embodiments, R₁ and R₂ are methyl.

[0309] In some embodiments, x+y+z is at least 1. In other embodiments, x+y+z is at least 2. In other embodiments, x+y+z is 1, 2, 3, 4, 5, 6, 7, 8, 9 or 10. Each occurrence of A, B, C, D or E in a macrocycle or macrocycle precursor is independently selected. For example, a sequence represented by the formula [A]ₓ, when x is 3, encompasses embodiments wherein the amino acids are not identical, e.g. Gln-Asp-Ala as well as embodiments wherein the amino acids are identical, e.g. Gln-Gln-Gln. This applies for any value of x, y, or z in the indicated ranges.

[0310] In some embodiments, the peptidomimetic macrocycle comprises a secondary structure which is an α-helix and R₈ is —H, allowing intra-helical hydrogen bonding. In some embodiments, at least one of A, B, C, D or E is an α,α-disubstituted amino acid. In one example, B is an α,α-disubstituted amino acid. For example, at least one of A, B, C, D or E is 2-aminoisobutyric acid. In other embodiments, at least one of A, B, C, D or E is

[chemical structure]

[0311] In other embodiments, the length of the macrocycle-forming linker L as measured from a first Cα to a second Cα is selected to stabilize a desired secondary peptide structure, such as an α-helix formed by residues of the peptidomimetic macrocycle including, but not necessarily limited to, those between the first Cα to a second Cα.

[0312] Non-limiting examples of embodiments of the macrocycle-forming linker -L₁-L₂- are shown below.

[chemical structure]

[0313] In some embodiments, the peptidomimetic macrocycle has the Formula (III) or Formula (IIIa):

[chemical structure]

wherein:
[0314] each Aₐ, Cₐ, Dₐ, Eₐ, A_{b}, C_{b}, and D_{b} is independently a natural or non-natural amino acid or an amino acid analog;
[0315] each Bₐ and B_{b} is independently a natural or non-natural amino acid, amino acid analog,

[chemical structure]

[—NH-L₄-CO—], [—NH-L₄-SO₂—], or [—NH-L₄-];
[0316] each Rₐ₁ is independently alkyl, alkenyl, alkynyl, arylalkyl, cycloalkyl, cycloalkylalkyl, heteroalkyl, or heterocycloalkyl, any of which is unsubstituted or substituted; or H; or Rₐ₁ forms a macrocycle-forming linker L′ connected to the alpha position of one of the Dₐ or Eₐ amino acids; or together with Lₐ forms a ring that is unsubstituted or substituted;
[0317] each Rₐ₂ is independently alkyl, alkenyl, alkynyl, arylalkyl, cycloalkyl, cycloalkylalkyl, heteroalkyl, or heterocycloalkyl, any of which is unsubstituted or substituted; or H; or Rₐ₂ forms a macrocycle-forming linker L′ connected to the alpha position of one of the Dₐ or Eₐ amino acids; or together with Lₐ forms a ring that is unsubstituted or substituted;
[0318] each R_{b1} is independently alkyl, alkenyl, alkynyl, arylalkyl, cycloalkyl, cycloalkylalkyl, heteroalkyl, or heterocycloalkyl, any of which is unsubstituted or substituted; or H; or R_{b1} forms a macrocycle-forming linker L′ connected to the alpha position of one of the D_{b} amino acids; or together with L_{b} forms a ring that is unsubstituted or substituted;
[0319] each R₃ is independently alkyl, alkenyl, alkynyl, arylalkyl, heteroalkyl, cycloalkyl, heterocycloalkyl, cycloalkylalkyl, cycloaryl, or heterocycloaryl, any of which is unsubstituted or substituted, or H;
[0320] each Lₐ is independently a macrocycle-forming linker, and optionally forms a ring with Rₐ₁ or Rₐ₂ that is unsubstituted or substituted;
[0321] each L_{b} is independently a macrocycle-forming linker, and optionally forms a ring with R_{b1} that is unsubstituted or substituted;
[0322] each L′ is independently a macrocycle-forming linker;
[0323] each L₄ is independently alkylene, alkenylene, alkynylene, heteroalkylene, cycloalkylene, heterocycloalkylene, cycloarylene, heterocycloarylene, or [—R₄—K—R₄-]ₙ, any of which is unsubstituted or substituted;
[0324] each R₄ is independently alkylene, alkenylene, alkynylene, heteroalkylene, cycloalkylene, heterocycloalkylene, arylene, or heteroarylene, any of which is unsubstituted or substituted;
[0325] each K is independently O, S, SO, SO₂, CO, CO₂, OCO₂, NR₃, CONR₃, OCONR₃, OSO₂NR₃, NR_{3q}, CONR_{3q}, OCONR_{3q}, or OSO₂NR_{3q}, wherein each R_{3q} is independently a point of attachment to Rₐ₁, Rₐ₂, or R_{b1};
[0326] Rₐ₇ is alkyl, alkenyl, alkynyl, arylalkyl, cycloalkyl, heteroalkyl, cycloalkylalkyl, heterocycloalkyl, cycloaryl, or heterocycloaryl, any of which is unsubstituted or substituted; or H; or part of a cyclic structure with a Dₐ amino acid;
[0327] R_{b7} is alkyl, alkenyl, alkynyl, arylalkyl, cycloalkyl, heteroalkyl, cycloalkylalkyl, heterocycloalkyl, cycloaryl, or heterocycloaryl, any of which is unsubstituted or substituted; or H; or part of a cyclic structure with a D_{b} amino acid;
[0328] Rₐ₈ is alkyl, alkenyl, alkynyl, arylalkyl, cycloalkyl, heteroalkyl, cycloalkylalkyl, heterocycloalkyl, cycloaryl, or heterocycloaryl, any of which is unsubstituted or substituted; or H; or part of a cyclic structure with an Eₐ amino acid;
[0329] R_{b8} is alkyl, alkenyl, alkynyl, arylalkyl, cycloalkyl, heteroalkyl, cycloalkylalkyl, heterocycloalkyl, cycloaryl, or heterocycloaryl, any of which is unsubstituted or substituted; or H; or an amino acid sequence of 1-1000 amino acid residues;
[0330] each va and vb is independently an integer from 0-1000;
[0331] each wa and wb is independently an integer from 0-1000;
[0332] each uₐ and u_{b} is independently 0, 1, 2, 3, 4, 5, 6, 7, 8, 9, or 10, wherein ua+ub is at least 1;
[0333] each xa and xb is independently 0, 1, 2, 3, 4, 5, 6, 7, 8, 9, or 10;
[0334] each ya and yb is independently 0, 1, 2, 3, 4, 5, 6, 7, 8, 9, or 10;
[0335] each za and zb is independently 0, 1, 2, 3, 4, 5, 6, 7, 8, 9, or 10; and
[0336] each n is independently 1, 2, 3, 4, or 5,
   or a pharmaceutically-acceptable salt thereof.

[0337] In some embodiments, the peptidomimetic macrocycle has the Formula (III) or Formula (IIIa):

[chemical structure]

wherein:
[0338] each Aₐ, Cₐ, Dₐ, Eₐ, A_{b}, C_{b}, and D_{b} is independently a natural or non-natural amino acid or an amino acid analogue;
[0339] each Bₐ and B_{b} is independently a natural or non-natural amino acid, amino acid analog,

[chemical structure]

[—NH-L₄-CO—], [—NH-L₄-SO₂—], or [—NH-L₄-];
[0340] each Rₐ₁ is independently alkyl, alkenyl, alkynyl, arylalkyl, cycloalkyl, cycloalkylalkyl, heteroalkyl, or heterocycloalkyl, any of which is unsubstituted or substituted; or H; or Rₐ₁ forms a macrocycle-forming linker L′ connected to the alpha position of one of the Dₐ or Eₐ amino acids; or together with Lₐ forms a ring that is unsubstituted or substituted;
[0341] each Rₐ₂ is independently alkyl, alkenyl, alkynyl, arylalkyl, cycloalkyl, cycloalkylalkyl, heteroalkyl, or heterocycloalkyl, any of which is unsubstituted or substituted; or H; or Rₐ₂ forms a macrocycle-forming linker L′ connected to the alpha position of one of the Dₐ or Eₐ amino acids; or together with Lₐ forms a ring that is unsubstituted or substituted;
[0342] each R_{b1} is independently alkyl, alkenyl, alkynyl, arylalkyl, cycloalkyl, cycloalkylalkyl, heteroalkyl, or heterocycloalkyl, any of which is unsubstituted or substituted; or H; or R_{b1} forms a macrocycle-forming linker L′ connected to the alpha position of one of the D_{b} amino acids; or together with L_{b} forms a ring that is unsubstituted or substituted;
[0343] each R₃ is independently alkyl, alkenyl, alkynyl, arylalkyl, heteroalkyl, cycloalkyl, heterocycloalkyl, cycloalkylalkyl, cycloaryl, or heterocycloaryl, any of which is unsubstituted or substituted with R₅, or H;
[0344] each Lₐ is independently a macrocycle-forming linker, and optionally forms a ring with Rₐ₁ or Rₐ₂ that is unsubstituted or substituted;
[0345] each L_{b} is independently a macrocycle-forming linker, and optionally forms a ring with R_{b1} that is unsubstituted or substituted;
[0346] each L′ is independently a macrocycle-forming linker;
[0347] each L₄ is independently alkylene, alkenylene, alkynylene, heteroalkylene, cycloalkylene, heterocycloalkylene, cycloarylene, heterocycloarylene, or [—R₄—K—R₄—]ₙ, any of which is unsubstituted or substituted with R₅;
[0348] each R₄ is independently alkylene, alkenylene, alkynylene, heteroalkylene, cycloalkylene, heterocycloalkylene, arylene, or heteroarylene, any of which is unsubstituted or substituted with R₅;
[0349] each K is independently O, S, SO, SO₂, CO, CO₂, OCO₂, NR₃, CONR₃, OCONR₃, OSO₂NR₃, NR_{3q}, CONR_{3q}, OCONR_{3q}, or OSO₂NR_{3q}, wherein each R_{3q} is independently a point of attachment to Rₐ₁, Rₐ₂, or R_{b1};
[0350] each R₅ is independently halogen, alkyl, —OR₆, —N(R₆)₂, —SR₆, —SOR₆, —SO₂R₆, —CO₂R₆, a fluorescent moiety, a radioisotope, or a therapeutic agent;
[0351] each R₆ is independently H, alkyl, alkenyl, alkynyl, arylalkyl, cycloalkylalkyl, heterocycloalkyl, a fluorescent moiety, a radioisotope or a therapeutic agent;
[0352] each Rₐ₇ is independently alkyl, alkenyl, alkynyl, arylalkyl, cycloalkyl, heteroalkyl, cycloalkylalkyl, heterocycloalkyl, cycloaryl, or heterocycloaryl, any of which is unsubstituted or substituted with R₅; or H; or part of a cyclic structure with a Dₐ amino acid;
[0353] R_{b7} is alkyl, alkenyl, alkynyl, arylalkyl, cycloalkyl, heteroalkyl, cycloalkylalkyl, heterocycloalkyl, cycloaryl, or heterocycloaryl, any of which is unsubstituted or substituted with R₅; or H; or part of a cyclic structure with a D_{b} amino acid;
[0354] each Rₐ₈ is independently alkyl, alkenyl, alkynyl, arylalkyl, cycloalkyl, heteroalkyl, cycloalkylalkyl, heterocycloalkyl, cycloaryl, or heterocycloaryl, any of which is unsubstituted or substituted with R₅; or H; or part of a cyclic structure with an Eₐ amino acid;
[0355] R_{b8} is alkyl, alkenyl, alkynyl, arylalkyl, cycloalkyl, heteroalkyl, cycloalkylalkyl, heterocycloalkyl, cycloaryl, or heterocycloaryl, any of which is unsubstituted or substituted with R₅; or H; or an amino acid sequence of 1-1000 amino acid residues;
[0356] each va and vb is independently an integer from 0-1000;
[0357] each wa and wb is independently an integer from 0-1000;
[0358] each uₐ and u_{b} is independently 0, 1, 2, 3, 4, 5, 6, 7, 8, 9, or 10, wherein uₐ+u_{b} is at least 1;
[0359] each xa and xb is independently 0, 1, 2, 3, 4, 5, 6, 7, 8, 9, or 10;
[0360] each ya and yb is independently 0, 1, 2, 3, 4, 5, 6, 7, 8, 9, or 10;
[0361] each za and zb is independently 0, 1, 2, 3, 4, 5, 6, 7, 8, 9, or 10; and
[0362] each n is independently 1, 2, 3, 4, or 5,
   or a pharmaceutically-acceptable salt thereof.

[0363] In some embodiments, the peptidomimetic macrocycle of the invention has the formula defined above, wherein:
[0364] each Lₐ is independently a macrocycle-forming linker of the formula -L₁-L₂-, and optionally forms a ring with Rₐ₁ or Rₐ₂ that is unsubstituted or substituted;
[0365] each L_{b} is independently a macrocycle-forming linker of the formula -L₁-L₂-, and optionally forms a ring with R_{b1} that is unsubstituted or substituted;
[0366] each L′ is independently a macrocycle-forming linker of the formula -L₁-L₂-;
[0367] each L₁ and L₂ is independently alkylene, alkenylene, alkynylene, heteroalkylene, cycloalkylene, heterocycloalkylene, cycloarylene, heterocycloarylene, or [—R₄—K—R₄-]ₙ, any of which is unsubstituted or substituted with R₅;
[0368] each R₄ is independently alkylene, alkenylene, alkynylene, heteroalkylene, cycloalkylene, heterocycloalkylene, arylene, or heteroarylene, any of which is unsubstituted or substituted with R₅;
[0369] each K is independently O, S, SO, SO₂, CO, CO₂, OCO₂, NR₃, CONR₃, OCONR₃, OSO₂NR₃, NR_{3q}, CONR_{3q}, OCONR_{3q}, or OSO₂NR_{3q}, wherein each R_{3q} is independently a point of attachment to Rₐ₁, Rₐ₂, or R_{b1};
[0370] each R₅ is independently halogen, alkyl, —OR₆, —N(R₆)₂, —SR₆, —SOR₆, —SO₂R₆, —CO₂R₆, a fluorescent moiety, a radioisotope, or a therapeutic agent; and
[0371] each R₆ is independently H, alkyl, alkenyl, alkynyl, arylalkyl, cycloalkylalkyl, heterocycloalkyl, a fluorescent moiety, a radioisotope or a therapeutic agent,
   or a pharmaceutically-acceptable salt thereof.

[0372] In some embodiments, the peptidomimetic macrocycle has the formula defined above wherein one of Lₐ and L_{b} is a bis-thioether-containing macrocycle-forming linker. In some embodiments, one of Lₐ and L_{b} is a macrocycle-forming linker of the formula -L₁-S-L₂-S-L₃-.

[0373] In some embodiments, the peptidomimetic macrocycle has the formula defined above wherein one of Lₐ and L_{b} is a bis-sulfone-containing macrocycle-forming linker. In some embodiments, one of Lₐ and L_{b} is a macrocycle-forming linker of the formula -L₁-SO₂-L₂-SO₂-L₃-.

[0374] In some embodiments, the peptidomimetic macrocycle has the formula defined above wherein one of Lₐ and L_{b} is a bis-sulfoxide-containing macrocycle-forming linker. In some embodiments, one of Lₐ and L_{b} is a macrocycle-forming linker of the formula -L₁-S(O)-L₂-S(O)-L₃-.

[0375] In some embodiments, a peptidomimetic macrocycle of the invention comprises one or more secondary structures. In some embodiments, the peptidomimetic macrocycle comprises a secondary structure that is an α-helix. In some embodiments, the peptidomimetic macrocycle comprises a secondary structure that is a β-hairpin turn.

[0376] In some embodiments, uₐ is 0. In some embodiments, uₐ is 0, and L_{b} is a macrocycle-forming linker that crosslinks an α-helical secondary structure. In some embodiments, uₐ is 0, and L_{b} is a macrocycle-forming linker that crosslinks a β-hairpin secondary structure. In some embodiments, uₐ is 0, and L_{b} is a hydrocarbon-containing macrocycle-forming linker that crosslinks an α-helical secondary structure. In some embodiments, uₐ is 0, and L_{b} is a hydrocarbon-containing macrocycle-forming linker that crosslinks a β-hairpin secondary structure.

[0377] In some embodiments, u_{b} is 0. In some embodiments, u_{b} is 0, and Lₐ is a macrocycle-forming linker that crosslinks an α-helical secondary structure. In some embodiments, u_{b} is 0, and Lₐ is a macrocycle-forming linker that crosslinks a β-hairpin secondary structure. In some embodiments, u_{b} is 0, and Lₐ is a hydrocarbon-containing macrocycle-forming linker that crosslinks an α-helical secondary structure. In some embodiments, u_{b} is 0, and Lₐ is a hydrocarbon-containing macrocycle-forming linker that crosslinks a β-hairpin secondary structure.

[0378] In some embodiments, the peptidomimetic macrocycle comprises only α-helical secondary structures. In other embodiments, the peptidomimetic macrocycle comprises only β-hairpin secondary structures.

[0379] In other embodiments, the peptidomimetic macrocycle comprises a combination of secondary structures, wherein the secondary structures are α-helical and β-hairpin structures. In some embodiments, Lₐ and L_{b} are a combination of hydrocarbon-, triazole, or sulfur-containing macrocycle-forming linkers. In some embodiments, the peptidomimetic macrocycle comprises Lₐ and L_{b}, wherein Lₐ is a hydrocarbon-containing macrocycle-forming linker that crosslinks a β-hairpin structure, and L_{b} is a triazole-containing macrocycle-forming linker that crosslinks an α-helical structure. In some embodiments, the peptidomimetic macrocycle comprises Lₐ and L_{b}, wherein Lₐ is a hydrocarbon-containing macrocycle-forming linker that crosslinks an α-helical structure, and L_{b} is a triazole-containing macrocycle-forming linker that crosslinks a β-hairpin structure. In some embodiments, the peptidomimetic macrocycle comprises Lₐ and L_{b}, wherein Lₐ is a triazole-containing macrocycle-forming linker that crosslinks an α-helical structure, and L_{b} is a hydrocarbon-containing macrocycle-forming linker that crosslinks a (β-hairpin structure. In some embodiments, the peptidomimetic macrocycle comprises Lₐ and L_{b}, wherein Lₐ is a triazole-containing macrocycle-forming linker that crosslinks a (β-hairpin structure, and L_{b} is a hydrocarbon-containing macrocycle-forming linker that crosslinks an α-helical structure.

[0380] In some embodiments, uₐ+u_{b} is at least 1. In some embodiments, uₐ+u_{b}=2.

[0381] In some embodiments, uₐ is 1, u_{b} is 1, Lₐ is a triazole-containing macrocycle-forming linker that crosslinks an α-helical secondary structure, and L_{b} is a hydrocarbon-containing macrocycle-forming linker that crosslinks an α-helical structure. In some embodiments, uₐ is 1, u_{b} is 1, Lₐ is a triazole-containing macrocycle-forming linker that crosslinks an α-helical secondary structure, and L_{b} is a hydrocarbon-containing macrocycle-forming linker that crosslinks a β-hairpin structure. In some embodiments, uₐ is 1, u_{b} is 1, Lₐ is a triazole-containing macrocycle-forming linker that crosslinks a β-hairpin secondary structure, and L_{b} is a hydrocarbon-containing macrocycle-forming linker that crosslinks an α-helical structure. In some embodiments, uₐ is 1, u_{b} is 1, Lₐ is a triazole-containing macrocycle-forming linker that crosslinks a β-hairpin secondary structure, and L_{b} is a hydrocarbon-containing macrocycle-forming linker that crosslinks a β-hairpin structure.

[0382] In some embodiments, uₐ is 1, u_{b} is 1, Lₐ is a hydrocarbon-containing macrocycle-forming linker that crosslinks an α-helical secondary structure, and L_{b} is a triazole-containing macrocycle-forming linker that crosslinks an α-helical secondary structure. In some embodiments, uₐ is 1, u_{b} is 1, Lₐ is a hydrocarbon-containing macrocycle-forming linker that crosslinks an α-helical secondary structure, and L_{b} is a triazole-containing macrocycle-forming linker that crosslinks a β-hairpin secondary structure. In some embodiments, uₐ is 1, u_{b} is 1, Lₐ is a hydrocarbon-containing macrocycle-forming linker that crosslinks a β-hairpin secondary structure, and L_{b} is a triazole-containing macrocycle-forming linker that crosslinks an α-helical secondary structure. In some embodiments, uₐ is 1, u_{b} is 1, Lₐ is a hydrocarbon-containing macrocycle-forming linker that crosslinks a β-hairpin secondary structure, and L_{b} is a triazole-containing macrocycle-forming linker that crosslinks a β-hairpin secondary structure.

[0383] In some embodiments, uₐ is 1, u_{b} is 1, Lₐ is a hydrocarbon-containing macrocycle-forming linker with an α-helical secondary structure, and L_{b} is a sulfur-containing macrocycle-forming linker. In some embodiments, uₐ is 1, u_{b} is 1, Lₐ is a hydrocarbon-containing macrocycle-forming linker with a β-hairpin secondary structure, and L_{b} is a sulfur-containing macrocycle-forming linker.

[0384] In some embodiments, uₐ is 1, u_{b} is 1, Lₐ is a sulfur-containing macrocycle-forming linker, and L_{b} is a hydrocarbon-containing macrocycle-forming linker with an α-helical secondary structure. In some embodiments, uₐ is 1, u_{b} is 1, Lₐ is a sulfur-containing macrocycle-forming linker, and L_{b} is a hydrocarbon-containing macrocycle-forming linker with a β-hairpin secondary structure.

[0385] In some embodiments, uₐ is 1, u_{b} is 1, Lₐ is a hydrocarbon-containing macrocycle-forming linker that crosslinks an α-helical structure, and L_{b} is a hydrocarbon-containing macrocycle-forming linker that crosslinks an α-helical structure. In some embodiments, uₐ is 1, u_{b} is 1, Lₐ is a hydrocarbon-containing macrocycle-forming linker that crosslinks an α-helical structure, and L_{b} is a hydrocarbon-containing macrocycle-forming linker that crosslinks a 3-hairpin structure. In some embodiments, uₐ is 1, u_{b} is 1, Lₐ is a hydrocarbon-containing macrocycle-forming linker that crosslinks a β-hairpin structure, and L_{b} is a hydrocarbon-containing macrocycle-forming linker that crosslinks an α-helical structure. In some embodiments, uₐ is 1, u_{b} is 1, Lₐ is a hydrocarbon-containing macrocycle-forming linker that crosslinks a β-hairpin structure, and L_{b} is a hydrocarbon-containing macrocycle-forming linker that crosslinks a β-hairpin structure.

[0386] In some embodiments, R_{b1} is H.

[0387] Unless otherwise stated, any compounds (including peptidomimetic macrocycles, macrocycle precursors, and other compositions) are also meant to encompass compounds which differ only in the presence of one or more isotopically enriched atoms. For example, compounds having the described structures except for the replacement of a hydrogen atom by deuterium or tritium, or the replacement of a carbon atom by ¹³C or ¹⁴C are contemplated.

[0388] In some embodiments, the compounds disclosed herein can contain unnatural proportions of atomic isotopes at one or more of atoms that constitute such compounds. For example, the compounds can be radiolabeled with radioactive isotopes, such as for example tritium (³H), iodine-125 (¹²⁵I) or carbon-14 (¹⁴C). In other embodiments, one or more carbon atoms is replaced with a silicon atom. All isotopic variations of the compounds disclosed herein, whether radioactive or not, are contemplated herein.

[0389] In some embodiments, the peptidomimetic macrocycle comprises an amino acid sequence that is at least 60%, at least 65%, at least 70%, at least 75%, at least 80%, at least 85%, at least 90%, or at least 95% identical to an amino acid sequence listed in Table 1, Table 1a, Table 1b, Table 1c, Table 2a, Table 2b, Table 3, or Table 3a. In some embodiments, the peptidomimetic macrocycle comprises an amino acid sequence that is at least 60% identical to an amino acid sequence listed in Table 1, Table 1a, Table 1b, Table 1c, Table 2a, Table 2b, Table 3, or Table 3a. In some embodiments, the peptidomimetic macrocycle comprises an amino acid sequence that is at least 65% identical to an amino acid sequence listed in Table 1, Table 1a, Table 1b, Table 1c, Table 2a, Table 2b, Table 3, or Table 3a. In some embodiments, the peptidomimetic macrocycle comprises an amino acid sequence that is at least 70% identical to an amino acid sequence listed in Table 1, Table 1a, Table 1b, Table 1c, Table 2a, Table 2b, Table 3, or Table 3a. In some embodiments, the peptidomimetic macrocycle comprises an amino acid sequence that is at least 75% identical to an amino acid sequence listed in Table 1, Table 1a, Table 1b, Table 1c, Table 2a, Table 2b, Table 3, or Table 3a.

[0390] In some embodiments, the peptidomimetic macrocycle is at least 60%, at least 65%, at least 70%, at least 75%, at least 80%, at least 85%, at least 90%, or at least 95% identical to an amino acid sequence listed in Table 1, Table 1a, Table 1b, Table 1c, Table 2a, Table 2b, Table 3, or Table 3a. In some embodiments, the peptidomimetic macrocycle is at least 60% identical to an amino acid sequence listed in Table 1, Table 1a, Table 1b, Table 1c, Table 2a, Table 2b, Table 3, or Table 3a. In some embodiments, the peptidomimetic macrocycle is at least 65% identical to an amino acid sequence listed in Table 1, Table 1a, Table 1b, Table 1c, Table 2a, Table 2b, Table 3, or Table 3a. In some embodiments, the peptidomimetic macrocycle is at least 70% identical to an amino acid sequence listed in Table 1, Table 1a, Table 1b, Table 1c, Table 2a, Table 2b, Table 3, or Table 3a. In some embodiments, the peptidomimetic macrocycle is at least 75% identical to an amino acid sequence listed in Table 1, Table 1a, Table 1b, Table 1c, Table 2a, Table 2b, Table 3, or Table 3a.

[0391] In some embodiments, a peptidomimetic macrocycle has an amino acid sequence comprising a carboxy terminus, a cross link spanning amino acids in the i to i+7 position of the amino acid sequence, and at least 1, at least 2, at least 3, at least 4, at least 5, 1-100, 2-100, 3-100, 4-100, 5-100, 1-10, 2-10, 3-10, 4-10, or 5-10 amino acids between the i+7 position of the amino acid sequence and the carboxy terminus.

### Preparation of Peptidomimetic Macrocycles

[0392] Peptidomimetic macrocycles can be prepared by any of a variety of methods known in the art. For example, any of the residues indicated by “$” or “$r8” in Table 1, Table 1a, Table 1b, Table 1c, Table 2a, Table 2b, Table 3, or Table 3a can be substituted with a residue capable of forming a crosslinker with a second residue in the same molecule or a precursor of such a residue.

[0393] α,α-Disubstituted amino acids and amino acid precursors can be employed in synthesis of the peptidomimetic macrocycle precursor polypeptides. For example, the “S5-olefin amino acid” is (S)-α-(2′-pentenyl) alanine and the “R₈ olefin amino acid” is (R)-α-(2′-octenyl) alanine. Following incorporation of such amino acids into precursor polypeptides, the terminal olefins are reacted with a metathesis catalyst, leading to the formation of the peptidomimetic macrocycle. In various embodiments, the following amino acids can be employed in the synthesis of the peptidomimetic macrocycle:

[chemical structure]

[0394] In other embodiments, the peptidomimetic macrocycles are of Formula IV or IVa. In such embodiments, amino acid precursors are used containing an additional substituent R— at the alpha position. Such amino acids are incorporated into the macrocycle precursor at the desired positions, which can be at the positions where the crosslinker is substituted or, alternatively, elsewhere in the sequence of the macrocycle precursor. Cyclization of the precursor is then effected according to the indicated method.

### Pharmaceutically-Acceptable Salts

[0395] The invention provides the use of pharmaceutically-acceptable salts of any therapeutic compound described herein. Pharmaceutically-acceptable salts include, for example, acid-addition salts and base-addition salts. The acid that is added to the compound to form an acid-addition salt can be an organic acid or an inorganic acid. A base that is added to the compound to form a base-addition salt can be an organic base or an inorganic base. In some embodiments, a pharmaceutically-acceptable salt is a metal salt. In some embodiments, a pharmaceutically-acceptable salt is an ammonium salt.

[0396] Metal salts can arise from the addition of an inorganic base to a compound of the invention. The inorganic base consists of a metal cation paired with a basic counterion, such as, for example, hydroxide, carbonate, bicarbonate, or phosphate. The metal can be an alkali metal, alkaline earth metal, transition metal, or main group metal. In some embodiments, the metal is lithium, sodium, potassium, cesium, cerium, magnesium, manganese, iron, calcium, strontium, cobalt, titanium, aluminum, copper, cadmium, or zinc.

[0397] In some embodiments, a metal salt is a lithium salt, a sodium salt, a potassium salt, a cesium salt, a cerium salt, a magnesium salt, a manganese salt, an iron salt, a calcium salt, a strontium salt, a cobalt salt, a titanium salt, an aluminum salt, a copper salt, a cadmium salt, or a zinc salt.

[0398] Ammonium salts can arise from the addition of ammonia or an organic amine to a compound of the invention. In some embodiments, the organic amine is triethyl amine, diisopropyl amine, ethanol amine, diethanol amine, triethanol amine, morpholine, N-methylmorpholine, piperidine, N-methylpiperidine, N-ethylpiperidine, dibenzylamine, piperazine, pyridine, pyrrazole, pipyrrazole, imidazole, pyrazine, or pipyrazine.

[0399] In some embodiments, an ammonium salt is a triethyl amine salt, a diisopropyl amine salt, an ethanol amine salt, a diethanol amine salt, a triethanol amine salt, a morpholine salt, an N-methylmorpholine salt, a piperidine salt, an N-methylpiperidine salt, an N-ethylpiperidine salt, a dibenzylamine salt, a piperazine salt, a pyridine salt, a pyrrazole salt, a pipyrrazole salt, an imidazole salt, a pyrazine salt, or a pipyrazine salt.

[0400] Acid addition salts can arise from the addition of an acid to a compound of the invention. In some embodiments, the acid is organic. In some embodiments, the acid is inorganic. In some embodiments, the acid is hydrochloric acid, hydrobromic acid, hydroiodic acid, nitric acid, nitrous acid, sulfuric acid, sulfurous acid, a phosphoric acid, isonicotinic acid, lactic acid, salicylic acid, tartaric acid, ascorbic acid, gentisinic acid, gluconic acid, glucaronic acid, saccaric acid, formic acid, benzoic acid, glutamic acid, pantothenic acid, acetic acid, propionic acid, butyric acid, fumaric acid, succinic acid, methanesulfonic acid, ethanesulfonic acid, benzenesulfonic acid, p-toluenesulfonic acid, citric acid, oxalic acid, or maleic acid. Examples of suitable acid salts include acetate, adipate, benzoate, benzenesulfonate, butyrate, citrate, digluconate, dodecylsulfate, formate, fumarate, glycolate, hemisulfate, heptanoate, hexanoate, hydrochloride, hydrobromide, hydroiodide, lactate, maleate, malonate, methanesulfonate, 2-naphthalenesulfonate, nicotinate, nitrate, palmoate, phosphate, picrate, pivalate, propionate, salicylate, succinate, sulfate, tartrate, tosylate and undecanoate. Salts derived from appropriate bases include alkali metal (e.g., sodium), alkaline earth metal (e.g., magnesium), ammonium and N-(alkyl)₄⁺ salts.

[0401] In some embodiments, the salt is a hydrochloride salt, a hydrobromide salt, a hydroiodide salt, a nitrate salt, a nitrite salt, a sulfate salt, a sulfite salt, a phosphate salt, isonicotinate salt, a lactate salt, a salicylate salt, a tartrate salt, an ascorbate salt, a gentisinate salt, a gluconate salt, a glucaronate salt, a saccarate salt, a formate salt, a benzoate salt, a glutamate salt, a pantothenate salt, an acetate salt, a propionate salt, a butyrate salt, a fumarate salt, a succinate salt, a methanesulfonate (mesylate) salt, an ethanesulfonate salt, a benzenesulfonate salt, a p-toluenesulfonate salt, a citrate salt, an oxalate salt, or a maleate salt.

### Purity of Compounds of the Invention

[0402] Any compound herein can be purified. A compound herein can be least 1% pure, at least 2% pure, at least 3% pure, at least 4% pure, at least 5% pure, at least 6% pure, at least 7% pure, at least 8% pure, at least 9% pure, at least 10% pure, at least 11% pure, at least 12% pure, at least 13% pure, at least 14% pure, at least 15% pure, at least 16% pure, at least 17% pure, at least 18% pure, at least 19% pure, at least 20% pure, at least 21% pure, at least 22% pure, at least 23% pure, at least 24% pure, at least 25% pure, at least 26% pure, at least 27% pure, at least 28% pure, at least 29% pure, at least 30% pure, at least 31% pure, at least 32% pure, at least 33% pure, at least 34% pure, at least 35% pure, at least 36% pure, at least 37% pure, at least 38% pure, at least 39% pure, at least 40% pure, at least 41% pure, at least 42% pure, at least 43% pure, at least 44% pure, at least 45% pure, at least 46% pure, at least 47% pure, at least 48% pure, at least 49% pure, at least 50% pure, at least 51% pure, at least 52% pure, at least 53% pure, at least 54% pure, at least 55% pure, at least 56% pure, at least 57% pure, at least 58% pure, at least 59% pure, at least 60% pure, at least 61% pure, at least 62% pure, at least 63% pure, at least 64% pure, at least 65% pure, at least 66% pure, at least 67% pure, at least 68% pure, at least 69% pure, at least 70% pure, at least 71% pure, at least 72% pure, at least 73% pure, at least 74% pure, at least 75% pure, at least 76% pure, at least 77% pure, at least 78% pure, at least 79% pure, at least 80% pure, at least 81% pure, at least 82% pure, at least 83% pure, at least 84% pure, at least 85% pure, at least 86% pure, at least 87% pure, at least 88% pure, at least 89% pure, at least 90% pure, at least 91% pure, at least 92% pure, at least 93% pure, at least 94% pure, at least 95% pure, at least 96% pure, at least 97% pure, at least 98% pure, at least 99% pure, at least 99.1% pure, at least 99.2% pure, at least 99.3% pure, at least 99.4% pure, at least 99.5% pure, at least 99.6% pure, at least 99.7% pure, at least 99.8% pure, or at least 99.9% pure.

### Pharmaceutical Compositions

[0403] Pharmaceutical compositions disclosed herein include peptidomimetic macrocycles and pharmaceutically-acceptable derivatives or prodrugs thereof. A “pharmaceutically-acceptable derivative” means any pharmaceutically-acceptable salt, ester, salt of an ester, pro-drug or other derivative of a compound disclosed herein which, upon administration to a recipient, is capable of providing (directly or indirectly) a compound disclosed herein. Particularly favored pharmaceutically-acceptable derivatives are those that increase the bioavailability of the compounds when administered to a mammal (e.g., by increasing absorption into the blood of an orally administered compound) or which increases delivery of the active compound to a biological compartment (e.g., the brain or lymphatic system) relative to the parent species. Some pharmaceutically-acceptable derivatives include a chemical group which increases aqueous solubility or active transport across the gastrointestinal mucosa.

[0404] In some embodiments, peptidomimetic macrocycles are modified by covalently or non-covalently joining appropriate functional groups to enhance selective biological properties. Such modifications include those which increase biological penetration into a given biological compartment (e.g., blood, lymphatic system, central nervous system), increase oral availability, increase solubility to allow administration by injection, alter metabolism, and alter rate of excretion.

[0405] For preparing pharmaceutical compositions from the compounds disclosed herein, pharmaceutically-acceptable carriers include either solid or liquid carriers. Solid form preparations include powders, tablets, pills, capsules, cachets, suppositories, and dispersible granules. A solid carrier can be one or more substances, which also acts as diluents, flavoring agents, binders, preservatives, tablet disintegrating agents, or an encapsulating material.

[0406] In powders, the carrier is a finely divided solid, which is in a mixture with the finely divided active component. In tablets, the active component is mixed with the carrier having the necessary binding properties in suitable proportions and compacted in the shape and size desired.

[0407] Suitable solid excipients are carbohydrate or protein fillers include, but are not limited to sugars, including lactose, sucrose, mannitol, or sorbitol; starch from corn, wheat, rice, potato, or other plants; cellulose such as methyl cellulose, hydroxypropylmethyl-cellulose, or sodium carboxymethylcellulose; and gums including arabic and tragacanth; as well as proteins such as gelatin and collagen. If desired, disintegrating or solubilizing agents are added, such as the crosslinked polyvinyl pyrrolidone, agar, alginic acid, or a salt thereof, such as sodium alginate.

[0408] Liquid form preparations include solutions, suspensions, and emulsions, for example, water or water/propylene glycol solutions. For parenteral injection, liquid preparations can be formulated in solution in aqueous polyethylene glycol solution.

[0409] The pharmaceutical preparation can be in unit dosage form. In such form the preparation is subdivided into unit doses containing appropriate quantities of the active component. The unit dosage form can be a packaged preparation, the package containing discrete quantities of preparation, such as packaged tablets, capsules, and powders in vials or ampoules. Also, the unit dosage form can be a capsule, tablet, cachet, or lozenge itself, or it can be the appropriate number of any of these in packaged form.

[0410] When one or more compositions disclosed herein comprise a combination of a peptidomimetic macrocycle and one or more additional therapeutic or prophylactic agents, both the compound and the additional agent should be present at dosage levels of between about 1 to 100%, and more preferably between about 5 to 95% of the dosage normally administered in a monotherapy regimen. In some embodiments, the additional agents are administered separately, as part of a multiple dose regimen, from one or more compounds disclosed herein. Alternatively, those agents are part of a single dosage form, mixed together with the compounds disclosed herein in a single composition.

[0411] In some embodiments, a pharmaceutical composition disclosed herein comprises a peptidomimetic macrocycle at a concentration of about 5 mg/mL to about 50 mg/mL. In some embodiments, a pharmaceutical composition disclosed herein comprises a peptidomimetic macrocycle at a concentration of about 5 mg/mL to about 10 mg/mL, about 5 mg/mL to about 15 mg/mL, about 5 mg/mL to about 20 mg/mL, about 5 mg/mL to about 30 mg/mL, about 5 mg/mL to about 40 mg/mL, about 5 mg/mL to about 50 mg/mL, about 10 mg/mL to about 15 mg/mL, about 10 mg/mL to about 20 mg/mL, about 10 mg/mL to about 30 mg/mL, about 10 mg/mL to about 40 mg/mL, about 10 mg/mL to about 50 mg/mL, about 15 mg/mL to about 20 mg/mL, about 15 mg/mL to about 30 mg/mL, about 15 mg/mL to about 40 mg/mL, about 15 mg/mL to about 50 mg/mL, about 20 mg/mL to about 30 mg/mL, about 20 mg/mL to about 40 mg/mL, about 20 mg/mL to about 50 mg/mL, about 30 mg/mL to about 40 mg/mL, about 30 mg/mL to about 50 mg/mL, or about 40 mg/mL to about 50 mg/mL. In some embodiments, a pharmaceutical composition disclosed herein comprises a peptidomimetic macrocycle at a concentration of about 5 mg/mL, about 10 mg/mL, about 15 mg/mL, about 20 mg/mL, about 30 mg/mL, about 40 mg/mL, or about 50 mg/mL. In some embodiments, a pharmaceutical composition disclosed herein comprises a peptidomimetic macrocycle at a concentration of at least about 5 mg/mL, about 10 mg/mL, about 15 mg/mL, about 20 mg/mL, about 30 mg/mL, or about 40 mg/mL. In some embodiments, a pharmaceutical composition disclosed herein comprises a peptidomimetic macrocycle at a concentration of at most about 10 mg/mL, about 15 mg/mL, about 20 mg/mL, about 30 mg/mL, about 40 mg/mL, or about 50 mg/mL.

[0412] In some embodiments, a pharmaceutical composition disclosed herein comprises trehalose. In some embodiments, the concentration of trehalose in a pharmaceutical composition disclosed herein is about 10 mg/mL to about 500 mg/mL. In some embodiments, the concentration of trehalose in a pharmaceutical composition disclosed herein is about 10 mg/mL to about 20 mg/mL, about 10 mg/mL to about 30 mg/mL, about 10 mg/mL to about 40 mg/mL, about 10 mg/mL to about 50 mg/mL, about 10 mg/mL to about 60 mg/mL, about 10 mg/mL to about 70 mg/mL, about 10 mg/mL to about 80 mg/mL, about 10 mg/mL to about 90 mg/mL, about 10 mg/mL to about 100 mg/mL, about 10 mg/mL to about 250 mg/mL, about 10 mg/mL to about 500 mg/mL, about 20 mg/mL to about 30 mg/mL, about 20 mg/mL to about 40 mg/mL, about 20 mg/mL to about 50 mg/mL, about 20 mg/mL to about 60 mg/mL, about 20 mg/mL to about 70 mg/mL, about 20 mg/mL to about 80 mg/mL, about 20 mg/mL to about 90 mg/mL, about 20 mg/mL to about 100 mg/mL, about 20 mg/mL to about 250 mg/mL, about 20 mg/mL to about 500 mg/mL, about 30 mg/mL to about 40 mg/mL, about 30 mg/mL to about 50 mg/mL, about 30 mg/mL to about 60 mg/mL, about 30 mg/mL to about 70 mg/mL, about 30 mg/mL to about 80 mg/mL, about 30 mg/mL to about 90 mg/mL, about 30 mg/mL to about 100 mg/mL, about 30 mg/mL to about 250 mg/mL, about 30 mg/mL to about 500 mg/mL, about 40 mg/mL to about 50 mg/mL, about 40 mg/mL to about 60 mg/mL, about 40 mg/mL to about 70 mg/mL, about 40 mg/mL to about 80 mg/mL, about 40 mg/mL to about 90 mg/mL, about 40 mg/mL to about 100 mg/mL, about 40 mg/mL to about 250 mg/mL, about 40 mg/mL to about 500 mg/mL, about 50 mg/mL to about 60 mg/mL, about 50 mg/mL to about 70 mg/mL, about 50 mg/mL to about 80 mg/mL, about 50 mg/mL to about 90 mg/mL, about 50 mg/mL to about 100 mg/mL, about 50 mg/mL to about 250 mg/mL, about 50 mg/mL to about 500 mg/mL, about 60 mg/mL to about 70 mg/mL, about 60 mg/mL to about 80 mg/mL, about 60 mg/mL to about 90 mg/mL, about 60 mg/mL to about 100 mg/mL, about 60 mg/mL to about 250 mg/mL, about 60 mg/mL to about 500 mg/mL, about 70 mg/mL to about 80 mg/mL, about 70 mg/mL to about 90 mg/mL, about 70 mg/mL to about 100 mg/mL, about 70 mg/mL to about 250 mg/mL, about 70 mg/mL to about 500 mg/mL, about 80 mg/mL to about 90 mg/mL, about 80 mg/mL to about 100 mg/mL, about 80 mg/mL to about 250 mg/mL, about 80 mg/mL to about 500 mg/mL, about 90 mg/mL to about 100 mg/mL, about 90 mg/mL to about 250 mg/mL, about 90 mg/mL to about 500 mg/mL, about 100 mg/mL to about 250 mg/mL, about 100 mg/mL to about 500 mg/mL, or about 250 mg/mL to about 500 mg/mL. In some embodiments, the concentration of trehalose in a pharmaceutical composition disclosed herein is about 10 mg/mL, about 20 mg/mL, about 30 mg/mL, about 40 mg/mL, about 50 mg/mL, about 60 mg/mL, about 70 mg/mL, about 80 mg/mL, about 90 mg/mL, about 100 mg/mL, about 250 mg/mL, or about 500 mg/mL. In some embodiments, the concentration of trehalose in a pharmaceutical composition disclosed herein is at least about 10 mg/mL, about 20 mg/mL, about 30 mg/mL, about 40 mg/mL, about 50 mg/mL, about 60 mg/mL, about 70 mg/mL, about 80 mg/mL, about 90 mg/mL, about 100 mg/mL, or about 250 mg/mL. In some embodiments, the concentration of trehalose in a pharmaceutical composition disclosed herein is at most about 20 mg/mL, about 30 mg/mL, about 40 mg/mL, about 50 mg/mL, about 60 mg/mL, about 70 mg/mL, about 80 mg/mL, about 90 mg/mL, about 100 mg/mL, about 250 mg/mL, or about 500 mg/mL.

[0413] In some embodiments, the concentration of trehalose in a pharmaceutical composition disclosed herein is about 100 mM to about 500 mM. In some embodiments, the concentration of trehalose in a pharmaceutical composition disclosed herein is about 100 mM to about 200 mM, about 100 mM to about 220 mM, about 100 mM to about 240 mM, about 100 mM to about 260 mM, about 100 mM to about 280 mM, about 100 mM to about 300 mM, about 100 mM to about 350 mM, about 100 mM to about 400 mM, about 100 mM to about 450 mM, about 100 mM to about 500 mM, about 200 mM to about 220 mM, about 200 mM to about 240 mM, about 200 mM to about 260 mM, about 200 mM to about 280 mM, about 200 mM to about 300 mM, about 200 mM to about 350 mM, about 200 mM to about 400 mM, about 200 mM to about 450 mM, about 200 mM to about 500 mM, about 220 mM to about 240 mM, about 220 mM to about 260 mM, about 220 mM to about 280 mM, about 220 mM to about 300 mM, about 220 mM to about 350 mM, about 220 mM to about 400 mM, about 220 mM to about 450 mM, about 220 mM to about 500 mM, about 240 mM to about 260 mM, about 240 mM to about 280 mM, about 240 mM to about 300 mM, about 240 mM to about 350 mM, about 240 mM to about 400 mM, about 240 mM to about 450 mM, about 240 mM to about 500 mM, about 260 mM to about 280 mM, about 260 mM to about 300 mM, about 260 mM to about 350 mM, about 260 mM to about 400 mM, about 260 mM to about 450 mM, about 260 mM to about 500 mM, about 280 mM to about 300 mM, about 280 mM to about 350 mM, about 280 mM to about 400 mM, about 280 mM to about 450 mM, about 280 mM to about 500 mM, about 300 mM to about 350 mM, about 300 mM to about 400 mM, about 300 mM to about 450 mM, about 300 mM to about 500 mM, about 350 mM to about 400 mM, about 350 mM to about 450 mM, about 350 mM to about 500 mM, about 400 mM to about 450 mM, about 400 mM to about 500 mM, or about 450 mM to about 500 mM. In some embodiments, the concentration of trehalose in a pharmaceutical composition disclosed herein is about 100 mM, about 200 mM, about 220 mM, about 240 mM, about 260 mM, about 280 mM, about 300 mM, about 350 mM, about 400 mM, about 450 mM, or about 500 mM. In some embodiments, the concentration of trehalose in a pharmaceutical composition disclosed herein is at least about 100 mM, about 200 mM, about 220 mM, about 240 mM, about 260 mM, about 280 mM, about 300 mM, about 350 mM, about 400 mM, or about 450 mM. In some embodiments, the concentration of trehalose in a pharmaceutical composition disclosed herein is at most about 200 mM, about 220 mM, about 240 mM, about 260 mM, about 280 mM, about 300 mM, about 350 mM, about 400 mM, about 450 mM, or about 500 mM.

[0414] In some embodiments, a pharmaceutical composition disclosed herein comprises a tonicity adjusting agent. In some embodiments, the concentration of the tonicity adjusting agent is about 100 mM to about 500 mM. In some embodiments, the concentration of the tonicity adjusting agent is about 100 mM to about 200 mM, about 100 mM to about 220 mM, about 100 mM to about 240 mM, about 100 mM to about 260 mM, about 100 mM to about 280 mM, about 100 mM to about 300 mM, about 100 mM to about 350 mM, about 100 mM to about 400 mM, about 100 mM to about 450 mM, about 100 mM to about 500 mM, about 200 mM to about 220 mM, about 200 mM to about 240 mM, about 200 mM to about 260 mM, about 200 mM to about 280 mM, about 200 mM to about 300 mM, about 200 mM to about 350 mM, about 200 mM to about 400 mM, about 200 mM to about 450 mM, about 200 mM to about 500 mM, about 220 mM to about 240 mM, about 220 mM to about 260 mM, about 220 mM to about 280 mM, about 220 mM to about 300 mM, about 220 mM to about 350 mM, about 220 mM to about 400 mM, about 220 mM to about 450 mM, about 220 mM to about 500 mM, about 240 mM to about 260 mM, about 240 mM to about 280 mM, about 240 mM to about 300 mM, about 240 mM to about 350 mM, about 240 mM to about 400 mM, about 240 mM to about 450 mM, about 240 mM to about 500 mM, about 260 mM to about 280 mM, about 260 mM to about 300 mM, about 260 mM to about 350 mM, about 260 mM to about 400 mM, about 260 mM to about 450 mM, about 260 mM to about 500 mM, about 280 mM to about 300 mM, about 280 mM to about 350 mM, about 280 mM to about 400 mM, about 280 mM to about 450 mM, about 280 mM to about 500 mM, about 300 mM to about 350 mM, about 300 mM to about 400 mM, about 300 mM to about 450 mM, about 300 mM to about 500 mM, about 350 mM to about 400 mM, about 350 mM to about 450 mM, about 350 mM to about 500 mM, about 400 mM to about 450 mM, about 400 mM to about 500 mM, or about 450 mM to about 500 mM. In some embodiments, the concentration of the tonicity adjusting agent is about 100 mM, about 200 mM, about 220 mM, about 240 mM, about 260 mM, about 280 mM, about 300 mM, about 350 mM, about 400 mM, about 450 mM, or about 500 mM. In some embodiments, the concentration of the tonicity adjusting agent is at least about 100 mM, about 200 mM, about 220 mM, about 240 mM, about 260 mM, about 280 mM, about 300 mM, about 350 mM, about 400 mM, or about 450 mM. In some embodiments, the concentration of the tonicity adjusting agent is at most about 200 mM, about 220 mM, about 240 mM, about 260 mM, about 280 mM, about 300 mM, about 350 mM, about 400 mM, about 450 mM, or about 500 mM. In some embodiments, the tonicity adjusting agent is trehalose.

[0415] A pharmaceutical composition of the disclosure can comprise polysorbate. In some embodiments, polysorbate acts as a stabilizing agent. In some embodiments, polysorbate is present in a pharmaceutical composition disclosed herein at a concentration of about 50 ppm to about 500 ppm. In some embodiments, polysorbate is present in a pharmaceutical composition disclosed herein at a concentration of about 50 ppm to about 100 ppm, about 50 ppm to about 150 ppm, about 50 ppm to about 200 ppm, about 50 ppm to about 250 ppm, about 50 ppm to about 300 ppm, about 50 ppm to about 350 ppm, about 50 ppm to about 400 ppm, about 50 ppm to about 450 ppm, about 50 ppm to about 500 ppm, about 100 ppm to about 150 ppm, about 100 ppm to about 200 ppm, about 100 ppm to about 250 ppm, about 100 ppm to about 300 ppm, about 100 ppm to about 350 ppm, about 100 ppm to about 400 ppm, about 100 ppm to about 450 ppm, about 100 ppm to about 500 ppm, about 150 ppm to about 200 ppm, about 150 ppm to about 250 ppm, about 150 ppm to about 300 ppm, about 150 ppm to about 350 ppm, about 150 ppm to about 400 ppm, about 150 ppm to about 450 ppm, about 150 ppm to about 500 ppm, about 200 ppm to about 250 ppm, about 200 ppm to about 300 ppm, about 200 ppm to about 350 ppm, about 200 ppm to about 400 ppm, about 200 ppm to about 450 ppm, about 200 ppm to about 500 ppm, about 250 ppm to about 300 ppm, about 250 ppm to about 350 ppm, about 250 ppm to about 400 ppm, about 250 ppm to about 450 ppm, about 250 ppm to about 500 ppm, about 300 ppm to about 350 ppm, about 300 ppm to about 400 ppm, about 300 ppm to about 450 ppm, about 300 ppm to about 500 ppm, about 350 ppm to about 400 ppm, about 350 ppm to about 450 ppm, about 350 ppm to about 500 ppm, about 400 ppm to about 450 ppm, about 400 ppm to about 500 ppm, or about 450 ppm to about 500 ppm. In some embodiments, polysorbate is present in a pharmaceutical composition disclosed herein at a concentration of about 50 ppm, about 100 ppm, about 150 ppm, about 200 ppm, about 250 ppm, about 300 ppm, about 350 ppm, about 400 ppm, about 450 ppm, or about 500 ppm. In some embodiments, polysorbate is present in a pharmaceutical composition disclosed herein at a concentration of at least about 50 ppm, about 100 ppm, about 150 ppm, about 200 ppm, about 250 ppm, about 300 ppm, about 350 ppm, about 400 ppm, or about 450 ppm. In some embodiments, polysorbate is present in a pharmaceutical composition disclosed herein at a concentration of at most about 100 ppm, about 150 ppm, about 200 ppm, about 250 ppm, about 300 ppm, about 350 ppm, about 400 ppm, about 450 ppm, or about 500 ppm. Non-limiting examples of a polysorbate present in a pharmaceutical composition disclosed herein include polysorbate 20, polysorbate 21, polysorbate 40, polysorbate 60, polysorbate 61, polysorbate 65, polysorbate 80, polysorbate 81, polysorbate 85 or polysorbate 120.

[0416] In some aspects, the disclosure provides a pharmaceutical formulation comprising a therapeutically-effective amount of one or more of the peptidomimetic macrocycles described above, formulated together with one or more pharmaceutically-acceptable carriers (additives) and/or diluents. In one embodiment, one or more of the peptidomimetic macrocycles described herein are formulated for parenteral administration, one or more peptidomimetic macrocycles disclosed herein can be formulated as aqueous or non-aqueous solutions, dispersions, suspensions or emulsions or sterile powders which can be reconstituted into sterile injectable solutions or dispersions just prior to use. Such formulations can comprise sugars, alcohols, antioxidants, buffers, bacteriostats, solutes which render the formulation isotonic with the blood of the intended recipient or suspending or thickening agents. These compositions can also contain adjuvants such as preservatives, wetting agents, emulsifying agents and dispersing agents. Prevention of the action of microorganisms upon the subject compounds can be ensured by the inclusion of various antibacterial and antifungal agents, for example, paraben, chlorobutanol, phenol sorbic acid, and the like. It can also be desirable to include isotonic agents, such as sugars, sodium chloride, and the like into the compositions. In addition, prolonged absorption of the injectable pharmaceutical form can be brought about by the inclusion of agents which delay absorption such as aluminum monostearate and gelatin. If desired, the formulation can be diluted prior to use with, for example, an isotonic saline solution or a dextrose solution. In some examples, the peptidomimetic macrocycle is formulated as an aqueous solution and is administered intravenously.

### Mode of Administration

[0417] A therapeutically effective amount of a peptidomimetic macrocycle of the disclosure can be administered in either single or multiple doses by any of the accepted modes of administration. In some embodiments, the peptidomimetic macrocycles of the disclosure are administered parenterally, for example, by subcutaneous, intramuscular, intrathecal, intravenous or epidural injection. For example, the peptidomimetic macrocycle is administered intravenously, intra-arterially, subcutaneously or by infusion. In some examples, the peptidomimetic macrocycle is administered intravenously. In some examples, the peptidomimetic macrocycle is administered intra-arterially.

[0418] Regardless of the route of administration selected, the peptidomimetic macrocycles of the present disclosure, and/or the pharmaceutical compositions of the present disclosure, are formulated into pharmaceutically-acceptable dosage forms. The peptidomimetic macrocycles according to the disclosure can be formulated for administration in any convenient way for use in human or veterinary medicine, by analogy with other pharmaceuticals.

[0419] In some embodiments, a peptidomimetic macrocycle is administered in combination with an additional pharmaceutically-active agent, for example, any additional therapeutic agent described herein. In some embodiments, the additional pharmaceutically-active agent is administered parenterally, for example, by subcutaneous, intramuscular, intrathecal, intravenous or epidural injection. A peptidomimetic macrocycle and an additional pharmaceutically-active agent, for example, any additional therapeutic agent described herein can be administered via the same or different administration routes. For example, it may be advantageous to administer either the peptidomimetic macrocycle or the additional pharmaceutically-active agent, for example, any additional therapeutic agent described herein, intravenously and the other systemically or orally. For example, the peptidomimetic macrocycle can be administered intravenously and the additional pharmaceutically-active agent can be administered orally. In another example both the peptidomimetic macrocycle and the additional pharmaceutically-active agent, for example, any additional therapeutic agent described herein, are administered intravenously.

### Combination Treatment

[0420] Provided herein are methods for the treatment of cancer which involve the administration of a peptidomimetic macrocycle disclosed herein in combination with one or more additional therapies to a subject with cancer. In some embodiments, the cancer possesses a p53 deactivating mutation and/or lacks wild type p53. In some embodiments, the cancer is determined to possess a p53 deactivating mutation and/or lacks wild type p53 prior to the beginning of treatment. In some embodiments, the subject possesses wild-type p53 in non-cancerous tissues such as the bone marrow or tissue of the digestive tract. In some embodiments, presented herein are combination therapies for the treatment of cancer which involve the administration of an effective amount of a peptidomimetic macrocycle disclosed herein in combination with an effective amount of an additional pharmaceutically-active agent to a subject with a p53-mutant cancer and bone marrow expressing wild type p53. In some embodiments, presented herein are combination therapies for the treatment of cancer which involve the administration of an effective amount of a peptidomimetic macrocycle disclosed herein in combination with an effective amount of an additional pharmaceutically-active agent to a subject with a cancer lacking wild type p53 and bone marrow expressing wild type p53. In some embodiments, presented herein are combination therapies for the treatment of cancer which involve the administration of an effective amount of a peptidomimetic macrocycle disclosed herein in combination with an effective amount of an additional pharmaceutically-active agent to a subject with a p53-mutant cancer and tissue of the digestive tract expressing wild type p53. In some embodiments, presented herein are combination therapies for the treatment of cancer which involve the administration of an effective amount of a peptidomimetic macrocycle disclosed herein in combination with an effective amount of an additional pharmaceutically-active agent to a subject with a cancer lacking wild type p53 and tissue of the digestive tract expressing wild type p53.

[0421] As used herein, the term “in combination,” refers, in the context of the administration of the peptidomimetic macrocycles, to the administration of the peptidomimetic macrocycles prior to, concurrently with, or subsequent to the administration of one or more additional therapies (e.g., pharmaceutically-active agents, surgery, or radiation) for use in treating cancer. The use of the term “in combination” does not restrict the order in which the peptidomimetic macrocycles and one or more additional therapies are administered to a subject.

[0422] The peptidomimetic macrocycles or a composition comprising the same and the at least one additional pharmaceutically-active agent, for example, any additional therapeutic agent described herein, or a composition comprising same can be administered simultaneously (i.e., simultaneous administration) and/or sequentially (i.e., sequential administration).

[0423] According to certain embodiments, the peptidomimetic macrocycles and the at least one additional pharmaceutically-active agent, for example, any additional therapeutic agent described herein, are administered simultaneously, either in the same composition or in separate compositions. In some embodiments, simultaneous administration of a peptidomimetic macrocycle and at least one additional pharmaceutically-active agent, for example, any additional therapeutic agent described herein, involves administration of the peptidomimetic macrocycle and additional pharmaceutically-active agent with a time separation of no more than a few minutes, for example, less than about 15 minutes, less than about 10, less than about 5, or less than about 1 minute. When the drugs are administered simultaneously, the peptidomimetic macrocycle and the at least one additional pharmaceutically-active agent, for example, any additional therapeutic agent described herein, can be contained in the same composition (e.g., a composition comprising both the peptidomimetic macrocycle and the at least additional pharmaceutically-active agent) or in separate compositions (e.g., the peptidomimetic macrocycle is contained in one composition and the at least additional pharmaceutically-active agent is contained in another composition).

[0424] According to other embodiments, the peptidomimetic macrocycles and the at least one additional pharmaceutically-active agent, for example, any additional therapeutic agent described herein, are administered sequentially, i.e., the peptidomimetic macrocycle is administered either prior to or after the administration of the additional pharmaceutically-active agent. The term “sequential administration” as used herein means that the peptidomimetic macrocycle and the additional pharmaceutically-active agent, for example, any additional therapeutic agent described herein, are administered with a time separation of more than a few minutes, for example, more than about 15 minutes, more than about 20 or more minutes, more than about 30 or more minutes, more than about 40 or more minutes, more than about 50 or more minutes, or more than about 60 or more minutes. In some embodiments, the peptidomimetic macrocycle is administered before the additional pharmaceutically-active agent, for example, any additional therapeutic agent described herein. In some embodiments, the pharmaceutically-active agent, for example, any additional therapeutic agent described herein, is administered before the peptidomimetic macrocycle. The peptidomimetic macrocycle and the additional pharmaceutically-active agent, for example, any additional therapeutic agent described herein, can be contained in separate compositions, which may be contained in the same or different packages.

[0425] In some embodiments, the administration of the peptidomimetic macrocycles and the additional pharmaceutically-active agent, for example, any additional therapeutic agent described herein, are concurrent, i.e., the administration period of the peptidomimetic macrocycles and that of the agent overlap with each other. In some embodiments, the administration of the peptidomimetic macrocycles and the additional pharmaceutically-active agent, for example, any additional therapeutic agent described herein, are non-concurrent. For example, in some embodiments, the administration of the peptidomimetic macrocycles is terminated before the additional pharmaceutically-active agent, for example, any additional therapeutic agent described herein, is administered. In some embodiments, the administration of the additional pharmaceutically-active agent, for example, any additional therapeutic agent described herein, is terminated before the peptidomimetic macrocycle is administered. The time period between these two non-concurrent administrations can range from being days apart to being weeks apart.

[0426] The dosing frequency of the peptidomimetic macrocycle and the at least one additional pharmaceutically-active agent, for example, any additional therapeutic agent described herein, can be adjusted over the course of the treatment, based on the judgment of an administering physician. When administered separately, the peptidomimetic macrocycle and the at least one additional pharmaceutically-active agent, for example, any additional therapeutic agent described herein, can be administered at different dosing frequency or intervals. For example, the peptidomimetic macrocycle can be daily, while the at least one additional pharmaceutically-active agent, for example, any additional therapeutic agent described herein, can be administered more or less frequently. Or, both the peptidomimetic and the at least one additional pharmaceutically-active agent, for example, any additional therapeutic agent described herein, can be administered daily. In some embodiments, treatment with the peptidomimetic macrocycle can begin 1, 2, 3, 4, 5, 6, 7, 8, 9, or 10 days prior to treatment with the additional pharmaceutically-active agent. In addition, the peptidomimetic macrocycle and the at least one additional pharmaceutically-active agent, for example, any additional therapeutic agent described herein, can be administered using the same route of administration or using different routes of administration.

[0427] The combination of the peptidomimetic macrocycles and one or more additional therapies can be administered to a subject in the same pharmaceutical composition. Alternatively, the peptidomimetic macrocycles and one or more additional therapies can be administered concurrently to a subject in separate pharmaceutical compositions. The peptidomimetic macrocycles and one or more additional therapies can be administered sequentially to a subject in separate pharmaceutical compositions. Pharmaceutical compositions containing peptidomimetic macrocycles or one or more additional therapies can be administered to a subject by the same or different routes of administration.

[0428] The combination therapies provided herein can involve administering to a subject to in need thereof the peptidomimetic macrocycles in combination with other therapies for treating cancer. Other therapies for cancer or a condition associated therewith can be aimed at controlling or relieving one or more symptoms. Accordingly, in some embodiments, the combination therapies provided herein involve administering to a subject to in need thereof a pain reliever, or other therapies aimed at alleviating or controlling one or more symptoms associated with or a condition associated therewith.

### Dosing Regimen of Combination Treatment

[0429] Combination treatments disclosed herein can be administered with a variety of dosing regimens. The timing and selected dosage level of administration of a peptidomimetic macrocycle or an additional pharmaceutically-active agent can depend on a variety of factors including the activity of the particular peptidomimetic macrocycle employed, the route of administration, the rate of excretion or metabolism of the particular peptidomimetic macrocycle being employed, the duration of the treatment, the particular pharmaceutically-active agent used in combination with the particular peptidomimetic macrocycle employed, the age, sex, weight, condition, general health and prior medical history of the patient being treated, and other factors. The dosage values can also vary with the severity of the condition to be alleviated. For any particular subject, specific dosage regimens can be adjusted over time according to the individual need and the professional judgment of the person administering or supervising the administration of the compositions.

[0430] A medical professional, such as a physician or veterinarian, can readily determine and prescribe the effective amount of the pharmaceutical composition required. For example, a physician or veterinarian could start doses of the compounds of the disclosure employed in the pharmaceutical composition at levels lower than that required in order to achieve the desired therapeutic effect and gradually increase the dosage until the desired effect is achieved.

[0431] In some embodiments, a suitable daily dose of a peptidomimetic macrocycle of the disclosure can be an amount of the peptidomimetic macrocycle which is the lowest dose effective to induce cell cycle arrest in a tissue with a functional p53 protein. In some embodiments, a suitable dose or a peptidomimetic macrocycle of the disclosure is less than an amount of the peptidomimetic macrocycle that is needed to induce apoptosis in a tissue with a functional p53 protein. Such an effective dose can depend upon the factors described above. The precise time of administration and amount of any particular peptidomimetic macrocycle or other pharmaceutically-active agent that will yield the most effective treatment in a given patient can, in some instances, depend upon the activity, pharmacokinetics, and bioavailability of a particular peptidomimetic macrocycle, physiological condition of the patient (including age, sex, disease type and stage, general physical condition, responsiveness to a given dosage and type of medication), route of administration, and the like.

[0432] Dosage can be based on the amount of the peptidomimetic macrocycle per kg body weight of the patient. Other amounts are known to those of skill in the art and readily determined. Alternatively, the dosage of the subject disclosure can be determined by reference to the plasma concentrations of the peptidomimetic macrocycle. For example, the maximum plasma concentration (Cmax) and the area under the plasma concentration-time curve from time 0 to infinity (AUC) can be used.

[0433] In some embodiments, the subject is a human subject. Doses of a peptidomimetic macrocycle and/or additional pharmaceutically-active agent disclosed herein can be in the range of about 0.01 mg/kg to about 1000 mg/kg per day (e.g., about 0.01 mg/kg to about 100 mg/kg per day, about 0.01 mg/kg to about 10 mg/kg per day, about 0.01 mg/kg to about 3.2 mg/kg per day, about 0.1 mg/kg to about 100 mg/kg per day, about 0.1 mg/kg to about 50 mg/kg per day, about 0.1 mg/kg to about 10 mg/kg per day, about 0.1 mg/kg to about 3.2 mg/kg per day, at most about 3.2 mg/kg per day) of one or each component of the combinations described herein. In some embodiments, doses of a peptidomimetic macrocycle employed for human treatment are in the range of about 0.01 mg/kg to about 100 mg/kg per day (e.g., about 0.01 mg/kg to about 10 mg/kg per day, about 0.1 mg/kg to about 100 mg/kg per day, about 0.1 mg/kg to about 50 mg/kg per day, about 0.1 mg/kg to about 10 mg/kg per day, about 1 mg/kg per day). In some embodiments, doses of the additional pharmaceutically-active agent, for example, any additional therapeutic agent described herein, employed for human treatment can be in the range of about 0.01 mg/kg to about 100 mg/kg per day (e.g., about 0.1 mg/kg to about 100 mg/kg per day, about 0.1 mg/kg to about 50 mg/kg per day, about 10 mg/kg per day or about 30 mg/kg per day). The desired dose may be conveniently administered in a single dose, or as multiple doses administered at appropriate intervals, for example as two, three, four or more sub-doses per day.

[0434] In some embodiments, such as when given in combination with the at least one additional pharmaceutically active agent, for example, any additional therapeutic agent described herein, the dosage of a peptidomimetic macrocycle may be given at relatively lower dosages. In some embodiments, the dosage of a peptidomimetic macrocycle may be from about 1 ng/kg to about 100 mg/kg. The dosage of a peptidomimetic macrocycle may be at any dosage including, but not limited to, about 1 μg/kg, 25 μg/kg, 50 μg/kg, 75 μg/kg, 100 μg/kg, 125 μg/kg, 150 μg/kg, 175 μg/kg, 200 μg/kg, 225 μg/kg, 250 μg/kg, 275 μg/kg, 300 μg/kg, 325 μg/kg, 350 μg/kg, 375 μg/kg, 400 μg/kg, 425 μg/kg, 450 μg/kg, 475 μg/kg, 500 μg/kg, 525 μg/kg, 550 μg/kg, 575 μg/kg, 600 μg/kg, 625 μg/kg, 650 μg/kg, 675 μg/kg, 700 μg/kg, 725 μg/kg, 750 μg/kg, 775 μg/kg, 800 μg/kg, 825 μg/kg, 850 μg/kg, 875 μg/kg, 900 μg/kg, 925 μg/kg, 950 μg/kg, 975 μg/kg, 1 mg/kg, 1.5 mg/kg, 2.0 mg/kg, 2.5 mg/kg, 3 mg/kg, 3.1 mg/kg, 5 mg/kg, 10 mg/kg, 15 mg/kg, 20 mg/kg, 25 mg/kg, 30 mg/kg, 35 mg/kg, 40 mg/kg, 45 mg/kg, 50 mg/kg, 60 mg/kg, 70 mg/kg, 80 mg/kg, 90 mg/kg, or 100 mg/kg.

[0435] In some embodiments, the dosage of the additional pharmaceutically-active agent, for example, any additional therapeutic agent described herein, may be from about 1 ng/kg to about 100 mg/kg. The dosage of the additional pharmaceutically-active agent may be at any dosage including, but not limited to, about 1 μg/kg, 25 μg/kg, 50 μg/kg, 75 μg/kg, 100 μμg/kg, 125 μg/kg, 150 μg/kg, 175 μg/kg, 200 μg/kg, 225 μg/kg, 250 μg/kg, 275 μg/kg, 300 μg/kg, 325 μg/kg, 350 μg/kg, 375 μg/kg, 400 μg/kg, 425 μg/kg, 450 μg/kg, 475 μg/kg, 500 μg/kg, 525 μg/kg, 550 μg/kg, 575 μg/kg, 600 μg/kg, 625 μg/kg, 650 μg/kg, 675 μg/kg, 700 μg/kg, 725 μg/kg, 750 μg/kg, 775 μg/kg, 800 μg/kg, 825 μg/kg, 850 μg/kg, 875 μg/kg, 900 μg/kg, 925 g/kg, 950 μg/kg, 975 μg/kg, 1 mg/kg, 2.5 mg/kg, 5 mg/kg, 10 mg/kg, 15 mg/kg, 20 mg/kg, 25 mg/kg, 30 mg/kg, 35 mg/kg, 40 mg/kg, 45 mg/kg, 50 mg/kg, 60 mg/kg, 70 mg/kg, 80 mg/kg, 90 mg/kg, or 100 mg/kg.

[0436] In some embodiments, the dosage of the additional pharmaceutically-active agent, for example, any additional therapeutic agent described herein, is provided as an amount of agent per body surface area of a subject (e.g. mg/m²). In some embodiments, the dosage of the additional pharmaceutically-active agent, for example, any additional therapeutic agent described herein, is about 0.1 mg/m² to about 100 mg/m². In some embodiments, the dosage of the additional pharmaceutically-active agent, for example, any additional therapeutic agent described herein, is about 0.1 mg/m² to about 0.25 mg/m², about 0.1 mg/m² to about 0.5 mg/m², about 0.1 mg/m² to about 0.75 mg/m², about 0.1 mg/m² to about 1 mg/m², about 0.1 mg/m² to about 1.5 mg/m², about 0.1 mg/m² to about 2 mg/m², about 0.1 mg/m² to about 2.5 mg/m², about 0.1 mg/m² to about 5 mg/m², about 0.1 mg/m² to about 10 mg/m², about 0.1 mg/m² to about 75 mg/m², about 0.1 mg/m² to about 100 mg/m², about 0.25 mg/m² to about 0.5 mg/m², about 0.25 mg/m² to about 0.75 mg/m², about 0.25 mg/m² to about 1 mg/m², about 0.25 mg/m² to about 1.5 mg/m², about 0.25 mg/m² to about 2 mg/m², about 0.25 mg/m² to about 2.5 mg/m², about 0.25 mg/m² to about 5 mg/m², about 0.25 mg/m² to about 10 mg/m², about 0.25 mg/m² to about 75 mg/m², about 0.25 mg/m² to about 100 mg/m², about 0.5 mg/m² to about 0.75 mg/m², about 0.5 mg/m² to about 1 mg/m², about 0.5 mg/m² to about 1.5 mg/m², about 0.5 mg/m² to about 2 mg/m², about 0.5 mg/m² to about 2.5 mg/m², about 0.5 mg/m² to about 5 mg/m², about 0.5 mg/m² to about 10 mg/m², about 0.5 mg/m² to about 75 mg/m², about 0.5 mg/m² to about 100 mg/m², about 0.75 mg/m² to about 1 mg/m², about 0.75 mg/m² to about 1.5 mg/m², about 0.75 mg/m² to about 2 mg/m², about 0.75 mg/m² to about 2.5 mg/m², about 0.75 mg/m² to about 5 mg/m², about 0.75 mg/m² to about 10 mg/m², about 1 mg/m² to about 1.5 mg/m², about 1 mg/m² to about 2 mg/m², about 1 mg/m² to about 2.5 mg/m², about 1 mg/m² to about 5 mg/m², about 1 mg/m² to about 10 mg/m², about 1 mg/m² to about 75 mg/m², about 1 mg/m² to about 100 mg/m², about 1.5 mg/m² to about 2 mg/m², about 1.5 mg/m² to about 2.5 mg/m², about 1.5 mg/m² to about 5 mg/m², about 1.5 mg/m² to about 10 mg/m², about 1.5 mg/m² to about 75 mg/m², about 1.5 mg/m² to about 100 mg/m², about 2 mg/m² to about 2.5 mg/m², about 2 mg/m² to about 5 mg/m², about 2 mg/m² to about 10 mg/m², about 2 mg/m² to about 75 mg/m², about 2 mg/m² to about 100 mg/m², about 2.5 mg/m² to about 5 mg/m², about 2.5 mg/m² to about 10 mg/m², about 2.5 mg/m² to about 75 mg/m², about 2.5 mg/m² to about 100 mg/m², about 5 mg/m² to about 10 mg/m², 5 mg/m² to about 75 mg/m², about 5 mg/m² to about 100 mg/m², about 10 mg/m² to about 75 mg/m², about 10 mg/m² to about 100 mg/m², or about 75 mg/m² to about 100 mg/m². In some embodiments, the dosage of the additional pharmaceutically-active agent, for example, any additional therapeutic agent described herein, is about 0.1 mg/m², about 0.25 mg/m², about 0.5 mg/m², about 0.75 mg/m², about 1 mg/m², about 1.5 mg/m², about 2 mg/m², about 2.3 mg/m², about 2.5 mg/m², about 5 mg/m², about 10 mg/m², about 75 mg/m², or about 100 mg/m². In some embodiments, the dosage of the additional pharmaceutically-active agent, for example, any additional therapeutic agent described herein, is at least about 0.1 mg/m², about 0.25 mg/m², about 0.5 mg/m², about 0.75 mg/m², about 1 mg/m², about 1.5 mg/m², about 2 mg/m², about 2.5 mg/m², or about 5 mg/m². In some embodiments, the dosage of the additional pharmaceutically-active agent, for example, any additional therapeutic agent described herein, is at most about 0.25 mg/m², about 0.5 mg/m², about 0.75 mg/m², about 1 mg/m², about 1.5 mg/m², about 2 mg/m², about 2.5 mg/m², about 5 mg/m², about 10 mg/m², or about 75 mg/m².

[0437] In some embodiments, the dosage of the additional pharmaceutically-active agent is the approved dosage from the label of the additional pharmaceutically-active agent. In some embodiments, the dosage of the additional pharmaceutically-active agent is 1.5 mg/m² or 2.3 mg/m² topotecan or a pharmaceutically acceptable salt thereof. In some embodiments, the dosage of the additional pharmaceutically-active agent is 75 mg/m² topotecan or a pharmaceutically-acceptable salt thereof. In some embodiments, the approved dosages of the additional pharmaceutically-active agents can be reduced to address adverse side effects such as renal impairment or liver impairment.

[0438] The peptidomimetic macrocycle and the additional pharmaceutically-active agent, for example, any additional therapeutic agent described herein, can be provided in a single unit dosage form for being taken together or as separate entities (e.g. in separate containers). The peptidomimetic macrocycle and the additional pharmaceutically-active agent, for example, any additional therapeutic agent described herein, can be administered simultaneously or with a certain time difference. This time difference can be, for example, between about 0.1 hours to about 1 week. In some embodiments, the time difference is about 0.1 hours to about 6 days, about 0.1 hours to about 5 days, about 0.1 hours to about 4 days, about 0.1 hours to about 3 days, about 0.1 hours to about 48 hours, about 0.1 hours to about 36 hours, about 0.1 hours to about 24 hours, about 0.1 hours to about 12 hours, about 0.1 hours to about 6 hours, about 0.1 hours to about 1 hour, about 0.1 hours to about 0.5 hours, about 0.5 hours to about 1 week, about 0.5 hours to about 6 days, about 0.5 hours to about 5 days, about 0.5 hours to about 4 days, about 0.5 hours to about 3 days, about 0.5 hours to about 48 hours, about 0.5 hours to about 36 hours, about 0.5 hours to about 24 hours, about 0.5 hours to about 12 hours, about 0.5 hours to about 6 hours, about 0.5 hours to about 1 hour, about 1 hour to about 1 week, about 1 hour to about 6 days, about 1 hour to about 5 days, about 1 hour to about 4 days, about 1 hour to about 3 days, about 1 hour to about 48 hours, about 1 hour to about 36 hours, about 1 hour to about 24 hours, about 1 hour to about 12 hours, about 1 hour to about 6 hours, about 6 hours to about 12 hours, about 6 hours to about 1 week, about 6 hours to about 6 days, about 6 hours to about 5 days, about 6 hours to about 4 days, about 6 hours to about 3 days, about 6 hours to about 48 hours, about 6 hours to about 36 hours, about 6 hours to about 24 hours, about 6 hours to about 12 hours, about 12 hours to about 1 week, about 12 hours to about 6 days, about 12 hours to about 5 days, about 12 hours to about 4 days, about 12 hours to about 3 days, about 12 hours to about 48 hours, about 12 hours to about 36 hours, about 12 hours to about 24 hours, about 24 hours to about 1 week, about 24 hours to about 6 days, about 24 hours to about 5 days, about 24 hours to about 4 days, about 24 hours to about 3 days, about 24 hours to about 48 hours, about 24 hours to about 36 hours, about 36 hours to about 1 week, about 36 hours to about 6 days, about 36 hours to about 5 days, about 36 hours to about 4 days, about 36 hours to about 3 days, about 36 hours to about 48 hours, or about 48 hours to about 1 week. In some embodiments, the time period is about 1 week, about 6 days, about 5 days, about 4 days, about 3 days, about 48 hours, about 36 hours, about 12 hours, about 6 hours, about 0.5 hours, or about 0.1 hours. In some embodiments, the time period is at most about 1 week, at most about 6 days, at most about 5 days, at most about 4 days, at most about 3 days, at most about 48 hours, at most about 36 hours, at most about 12 hours, at most about 6 hours, or at most about 0.5 hours. In some embodiments, the time period is at least about 6 days, at least about 5 days, at least about 4 days, at least about 3 days, at least about 48 hours, at least about 36 hours, at least about 12 hours, at least about 6 hours, at least about 0.5 hours, or at least about 0.1 hours. In some embodiments, the peptidomimetic macrocycle is administered first, followed by the time difference, followed by administration of the additional pharmaceutically-active agent, for example, any additional therapeutic agent described herein. In some embodiments, the additional pharmaceutically-active agent, for example, any additional therapeutic agent described herein is administered, followed by the time difference, followed by administration of a peptidomimetic macrocycle.

[0439] In some embodiments, the peptidomimetic macrocycle is administered about 0.1 hours, about 0.2 hours, about 0.3 hours, about 0.4 hours, about 0.5 hours, about 1 hour, about 6 hours, about 12 hours, about 24 hours, about 36 hours, about 48 hours, about 3 days, about 4 days, about 5 days, about 6 days, or about 1 week before the additional pharmaceutically-active agent, for example, any additional therapeutic agent described herein, is administered. In some embodiments, the peptidomimetic macrocycle is administered about 1 day before the additional pharmaceutically-active agent, for example, any additional therapeutic agent described herein, is administered.

[0440] In some embodiments, the peptidomimetic macrocycle is administered about 0.1 hours, about 0.2 hours, about 0.3 hours, about 0.4 hours, about 0.5 hours, about 1 hour, about 6 hours, about 12 hours, about 24 hours, about 36 hours, about 48 hours, about 3 days, about 4 days, about 5 days, about 6 days, or about 1 week after the additional pharmaceutically-active agent, for example, any additional therapeutic agent described herein, is administered. In some embodiments, the peptidomimetic macrocycle is administered about 6 hours after the additional pharmaceutically-active agent, for example, any additional therapeutic agent described herein, is administered.

[0441] In some embodiments, the peptidomimetic macrocycle is administered chronologically before the additional pharmaceutically-active agent, for example, any additional therapeutic agent described herein. In some embodiments, the peptidomimetic macrocycle is administered from about 0.1 hours to about 1 week, about 0.1 hours to about 6 days, about 0.1 hours to about 5 days, about 0.1 hours to about 4 days, about 0.1 hours to about 3 days, about 0.1 hours to about 48 hours, about 0.1 hours to about 36 hours, about 0.1 hours to about 24 hours, about 0.1 hours to about 12 hours, about 0.1 hours to about 6 hours, about 0.1 hours to about 1 hour, about 0.1 hours to about 0.5 hours, about 0.5 hours to about 1 week, about 0.5 hours to about 6 days, about 0.5 hours to about 5 days, about 0.5 hours to about 4 days, about 0.5 hours to about 3 days, about 0.5 hours to about 48 hours, about 0.5 hours to about 36 hours, about 0.5 hours to about 24 hours, about 0.5 hours to about 12 hours, about 0.5 hours to about 6 hours, about 0.5 hours to about 1 hour, about 1 hour to about 1 week, about 1 hour to about 6 days, about 1 hour to about 5 days, about 1 hour to about 4 days, about 1 hour to about 3 days, about 1 hour to about 48 hours, about 1 hour to about 36 hours, about 1 hour to about 24 hours, about 1 hour to about 12 hours, about 1 hour to about 6 hours, about 6 hours to about 12 hours, about 6 hours to about 1 week, about 6 hours to about 6 days, about 6 hours to about 5 days, about 6 hours to about 4 days, about 6 hours to about 3 days, about 6 hours to about 48 hours, about 6 hours to about 36 hours, about 6 hours to about 24 hours, about 6 hours to about 12 hours, about 12 hours to about 1 week, about 12 hours to about 6 days, about 12 hours to about 5 days, about 12 hours to about 4 days, about 12 hours to about 3 days, about 12 hours to about 48 hours, about 12 hours to about 36 hours, about 12 hours to about 24 hours, about 24 hours to about 1 week, about 24 hours to about 6 days, about 24 hours to about 5 days, about 24 hours to about 4 days, about 24 hours to about 3 days, about 24 hours to about 48 hours, about 24 hours to about 36 hours, about 36 hours to about 1 week, about 36 hours to about 6 days, about 36 hours to about 5 days, about 36 hours to about 4 days, about 36 hours to about 3 days, about 36 hours to about 48 hours, about 48 hours to about 1 week or any combination thereof, before the additional pharmaceutically-active agent, for example, any additional therapeutic agent described herein, is administered. In some embodiments, the peptidomimetic macrocycle is administered at least about 6 days, at least about 5 days, at least about 4 days, at least about 3 days, at least about 48 hours, at least about 36 hours, at least about 12 hours, at least about 6 hours, at least about 0.5 hours, at least about 0.1 hours or any combination thereof, before the additional pharmaceutically-active agent, for example, any additional therapeutic agent described herein, is administered. For example, the peptidomimetic macrocycle can be administered at least 1 day before a topoisomerase inhibitor (e.g., topotecan) is administered.

[0442] In some embodiments, the peptidomimetic macrocycle is administered at most about 1 week, at most about 6 days, at most about 5 days, at most about 4 days, at most about 3 days, at most about 48 hours, at most about 36 hours, at most about 12 hours, at most about 6 hours, at most about 0.5 hours or any combination thereof, before the additional pharmaceutically-active agent is administered. For example, the peptidomimetic macrocycle can be administered at most about 1 week, at most about 6 days, at most about 5 days, at most about 4 days, at most about 3 days, at most about 48 hours, at most about 36 hours, at most about 12 hours, at most about 6 hours, at most about 0.5 hours or any combination thereof, before a topoisomerase inhibitor (e.g. topotecan) is administered.

[0443] In some embodiments, the peptidomimetic macrocycle is administered about 1 week, about 6 days, about 5 days, about 4 days, about 3 days, about 48 hours, about 36 hours, about 24 hours, about 12 hours, about 8 hours, about 6 hours, about 0.5 hours, about 0.1 hours, or any combination thereof, before the additional pharmaceutically-active agent, for example, any additional therapeutic agent described herein, is administered. For example, the peptidomimetic macrocycle can be administered about 1 week, about 6 days, about 5 days, about 4 days, about 3 days, about 48 hours, about 36 hours, about 12 hours, about 6 hours, about 0.5 hours, about 0.1 hours, or any combination thereof, before a topoisomerase inhibitor (e.g. topotecan) is administered.

[0444] In some embodiments, the peptidomimetic macrocycle is administered chronologically at the same time as the at least one additional pharmaceutically active agent, for example, any additional therapeutic agent described herein.

[0445] In some embodiments, the peptidomimetic macrocycle is administered chronologically after the additional pharmaceutically-active agent, for example, any additional therapeutic agent described herein. In some embodiments, the additional pharmaceutically-active agent, for example, any additional therapeutic agent described herein, is administered from 0.1 hours to about 1 week, about 0.1 hours to about 6 days, about 0.1 hours to about 5 days, about 0.1 hours to about 4 days, about 0.1 hours to about 3 days, about 0.1 hours to about 48 hours, about 0.1 hours to about 36 hours, about 0.1 hours to about 24 hours, about 0.1 hours to about 12 hours, about 0.1 hours to about 6 hours, about 0.1 hours to about 1 hour, about 0.1 hours to about 0.5 hours, about 0.5 hours to about 1 week, about 0.5 hours to about 6 days, about 0.5 hours to about 5 days, about 0.5 hours to about 4 days, about 0.5 hours to about 3 days, about 0.5 hours to about 48 hours, about 0.5 hours to about 36 hours, about 0.5 hours to about 24 hours, about 0.5 hours to about 12 hours, about 0.5 hours to about 6 hours, about 0.5 hours to about 1 hour, about 1 hour to about 1 week, about 1 hour to about 6 days, about 1 hour to about 5 days, about 1 hour to about 4 days, about 1 hour to about 3 days, about 1 hour to about 48 hours, about 1 hour to about 36 hours, about 1 hour to about 24 hours, about 1 hour to about 12 hours, about 1 hour to about 6 hours, about 6 hours to about 12 hours, about 6 hours to about 1 week, about 6 hours to about 6 days, about 6 hours to about 5 days, about 6 hours to about 4 days, about 6 hours to about 3 days, about 6 hours to about 48 hours, about 6 hours to about 36 hours, about 6 hours to about 24 hours, about 6 hours to about 12 hours, about 12 hours to about 1 week, about 12 hours to about 6 days, about 12 hours to about 5 days, about 12 hours to about 4 days, about 12 hours to about 3 days, about 12 hours to about 48 hours, about 12 hours to about 36 hours, about 12 hours to about 24 hours, about 24 hours to about 1 week, about 24 hours to about 6 days, about 24 hours to about 5 days, about 24 hours to about 4 days, about 24 hours to about 3 days, about 24 hours to about 48 hours, about 24 hours to about 36 hours, about 36 hours to about 1 week, about 36 hours to about 6 days, about 36 hours to about 5 days, about 36 hours to about 4 days, about 36 hours to about 3 days, about 36 hours to about 48 hours, about 48 hours to about 1 week, about 7-30 days, or any combination thereof, after the peptidomimetic macrocycle is administered. In some embodiments the additional pharmaceutically-active agent is administered at least about 0.1 hours, at least about 0.5 hours at least about 1 hour, at least about 6 hours, at least about 12 hours, at least about 24 hours, at least about 36 hours, at least about 48 hours, at least about 3 days, at least about 4 days, at least about 5 days, at least about 6 days, at least about 1 week, at least about 2 weeks, at least about 3 weeks, at least about 4 weeks, at least about 1 month, or any combination thereof, after the peptidomimetic macrocycle is administered.

[0446] In some embodiments, a topoisomerase inhibitor (e.g. topotecan) is administered at most about 0.1 hours, at most about 0.5 hours, at most about 1 hour, at most about 6 hours, at most about 12 hours, at most about 24 hours, at most about 36 hours, at most about 48 hours, at most about 3 days, at most about 4 days, at most about 5 days, at most about 6 days, at most about 1 week, at most about 2 weeks, at most about 3 weeks, at most about 4 weeks, at most about 1 month, or any combination thereof, after the peptidomimetic macrocycle is administered. For example, topotecan can be administered at most about 0.1 hours, at most about 0.5 hours at most about 1 hour at most about 6 hours, at most about 12 hours, at most about 24 hours, at most about 36 hours, at most about 48 hours, at most about 3 days, at most about 4 days, at most about 5 days, at most about 6 days, at most about 1 week, at most about 2 weeks, at most about 3 weeks, at most about 4 weeks, at most about 1 month, or any combination thereof, after the peptidomimetic macrocycle is administered.

[0447] In some embodiments, a pharmaceutically active agent (e.g. topotecan, docetaxel, carboplatin, paclitaxel, or any combination thereof) is administered about 0.1 hours, about 0.5 hours, about 1 hour, about 6 hours, about 8 hours about 12 hours, about 24 hours, about 36 hours, about 48 hours, about 3 days, about 4 days, about 5 days, about 6 days, about 1 week, about 2 weeks, about 3 weeks, about 4 weeks, about 1 month, or any combination thereof, after the peptidomimetic macrocycle is administered.

[0448] Also, contemplated herein is a drug holiday utilized among the administration of a peptidomimetic macrocycle and an additional pharmaceutically-active agent, for example, any additional therapeutic agent described herein. A drug holiday can be a period of days after the administration of the additional pharmaceutically-active agent, for example, any additional therapeutic agent described herein, and before the administration of a peptidomimetic macrocycle. A drug holiday can be a period of days after the administration of a peptidomimetic macrocycle and before the administration of the additional pharmaceutically-active agent, for example, any additional therapeutic agent described herein. A drug holiday can be a period of days after the sequential administration of one or more of a peptidomimetic macrocycle and an additional pharmaceutically-active agent, for example, any additional therapeutic agent described herein, and before the administration of the peptidomimetic macrocycle, the additional pharmaceutically-active agent, or another therapeutic agent. For example, a drug holiday can be a period of days after the sequential administration of a peptidomimetic macrocycle first, followed administration of an additional pharmaceutically-active agent, for example, any additional therapeutic agent described herein, and before the administration of the peptidomimetic macrocycle again. For example, a drug holiday can be a period of days after the sequential administration of an additional pharmaceutically-active agent first, followed administration of a peptidomimetic macrocycle and before the administration of the additional pharmaceutically-active agent, for example, any additional therapeutic agent described herein.

[0449] Suitably the drug holiday can be a period of 1 day, 2 days, 3 days, 4 days, 5 days, 6 days, 7 days, 8 days, 9 days, 10 days, 11 days, 12 days, 13 days, 14 days, 15 days, 16 days, 17 days, 18 days, 19 days, 20 days, 21 days, 22 days, 23 days, 24 days, 25 days, 26 days, 27 days, or 28 days; or from 1-24, 2-24, 3-24, 4-24, 5-24, 6-24, 7-24, 8-24, 9-24, 10-24, 11-24, or 12-24 hours; from 1-30, 2-30, 3-30, 4-30, 5-30, 6-30, 7-30, 8-30, 9, −30, 10-30, 11-30, 12-30, 13-30, 14-30, 15-30, 16-30, 17-30, 18-30, 19-30, 20-30, 21-30, 22-30, 23-30, 24-30, 25-30, 26-30, 27-30, 28-30, or 29-30 days, 1-4, 2-4,or 3-4 weeks; or from 1-12, 2-12, 3-12, 4-12, 5-12, 6-12, 7-12, 8-12, 9-12, 10-12, or 11-12 months.

[0450] In some embodiments, an additional pharmaceutically-active agent, for example, any additional therapeutic agent described herein, will be administered first in the sequence, followed by an optional drug holiday, followed by administration of a peptidomimetic macrocycle. In some embodiments, an additional pharmaceutically-active agent, for example, any additional therapeutic agent described herein, will be administered first in the sequence, followed by administration of a peptidomimetic macrocycle, followed by an optional drug holiday, followed by administration of an additional pharmaceutically-active agent.

[0451] In some embodiments, an additional pharmaceutically-active agent, for example, any additional therapeutic agent described herein, is administered for from 1-24, 2-24, 3-24, 4-24, 5-24, 6-24, 7-24, 8-24, 9-24, 10-24, 11-24, or 12-24 consecutive hours; from 1-30, 2-30, 3-30, 4-30, 5-30, 6-30, 7-30, 8-30, 9, −30, 10-30, 11-30, 12-30, 13-30, 14-30, 15-30, 16-30, 17-30, 18-30, 19-30, 20-30, 21-30, 22-30, 23-30, 24-30, 25-30, 26-30, 27-30, 28-30, or 29-30 consecutive days, 1-4, 2-4,or 3-4 consecutive weeks; or from 1-12, 2-12, 3-12, 4-12, 5-12, 6-12, 7-12, 8-12, 9-12, 10-12, or 11-12 consecutive months, followed by an optional drug holiday; followed by administration of a peptidomimetic macrocycle for from 1-24, 2-24, 3-24, 4-24, 5-24, 6-24, 7-24, 8-24, 9-24, 10-24, 11-24, or 12-24 consecutive hours; from 1-30, 2-30, 3-30, 4-30, 5-30, 6-30, 7-30, 8-30, 9, −30, 10-30, 11-30, 12-30, 13-30, 14-30, 15-30, 16-30, 17-30, 18-30, 19-30, 20-30, 21-30, 22-30, 23-30, 24-30, 25-30, 26-30, 27-30, 28-30, or 29-30 consecutive days, 1-4, 2-4,or 3-4 consecutive weeks; or from 1-12, 2-12, 3-12, 4-12, 5-12, 6-12, 7-12, 8-12, 9-12, 10-12, or 11-12 consecutive months. For example, a topoisomerase inhibitor is administered for from 1-24, 2-24, 3-24, 4-24, 5-24, 6-24, 7-24, 8-24, 9-24, 10-24, 11-24, or 12-24 consecutive hours; from 1-30, 2-30, 3-30, 4-30, 5-30, 6-30, 7-30, 8-30, 9, −30, 10-30, 11-30, 12-30, 13-30, 14-30, 15-30, 16-30, 17-30, 18-30, 19-30, 20-30, 21-30, 22-30, 23-30, 24-30, 25-30, 26-30, 27-30, 28-30, or 29-30 consecutive days, 1-4, 2-4,or 3-4 consecutive weeks; or from 1-12, 2-12, 3-12, 4-12, 5-12, 6-12, 7-12, 8-12, 9-12, 10-12, or 11-12 consecutive months; followed by a drug holiday of from 1-24, 2-24, 3-24, 4-24, 5-24, 6-24, 7-24, 8-24, 9-24, 10-24, 11-24, or 12-24 consecutive hours; from 1-30, 2-30, 3-30, 4-30, 5-30, 6-30, 7-30, 8-30, 9, −30, 10-30, 11-30, 12-30, 13-30, 14-30, 15-30, 16-30, 17-30, 18-30, 19-30, 20-30, 21-30, 22-30, 23-30, 24-30, 25-30, 26-30, 27-30, 28-30, or 29-30 consecutive days, 1-4, 2-4,or 3-4 consecutive weeks; or from 1-12, 2-12, 3-12, 4-12, 5-12, 6-12, 7-12, 8-12, 9-12, 10-12, or 11-12 consecutive months; followed by administration of a peptidomimetic macrocycle for from 1-24, 2-24, 3-24, 4-24, 5-24, 6-24, 7-24, 8-24, 9-24, 10-24, 11-24, or 12-24 consecutive hours; from 1-30, 2-30, 3-30, 4-30, 5-30, 6-30, 7-30, 8-30, 9, −30, 10-30, 11-30, 12-30, 13-30, 14-30, 15-30, 16-30, 17-30, 18-30, 19-30, 20-30, 21-30, 22-30, 23-30, 24-30, 25-30, 26-30, 27-30, 28-30, or 29-30 consecutive days, 1-4, 2-4,or 3-4 consecutive weeks; or from 1-12, 2-12, 3-12, 4-12, 5-12, 6-12, 7-12, 8-12, 9-12, 10-12, or 11-12 consecutive months.

[0452] In some embodiments, an additional pharmaceutically-active agent, for example, any additional therapeutic agent described herein, is administered for from 1-24, 2-24, 3-24, 4-24, 5-24, 6-24, 7-24, 8-24, 9-24, 10-24, 11-24, or 12-24 consecutive hours; from 1-30, 2-30, 3-30, 4-30, 5-30, 6-30, 7-30, 8-30, 9, −30, 10-30, 11-30, 12-30, 13-30, 14-30, 15-30, 16-30, 17-30, 18-30, 19-30, 20-30, 21-30, 22-30, 23-30, 24-30, 25-30, 26-30, 27-30, 28-30, or 29-30 consecutive days, 1-4, 2-4,or 3-4 consecutive weeks; or from 1-12, 2-12, 3-12, 4-12, 5-12, 6-12, 7-12, 8-12, 9-12, 10-12, or 11-12 consecutive months, followed by administration of a peptidomimetic macrocycle for from 1-24, 2-24, 3-24, 4-24, 5-24, 6-24, 7-24, 8-24, 9-24, 10-24, 11-24, or 12-24 consecutive hours; from 1-30, 2-30, 3-30, 4-30, 5-30, 6-30, 7-30, 8-30, 9, −30, 10-30, 11-30, 12-30, 13-30, 14-30, 15-30, 16-30, 17-30, 18-30, 19-30, 20-30, 21-30, 22-30, 23-30, 24-30, 25-30, 26-30, 27-30, 28-30, or 29-30 consecutive days, 1-4, 2-4,or 3-4 consecutive weeks; or from 1-12, 2-12, 3-12, 4-12, 5-12, 6-12, 7-12, 8-12, 9-12, 10-12, or 11-12 consecutive months, followed by an optional drug holiday; followed by administration of an additional pharmaceutically-active agent. For example, a topoisomerase inhibitor is administered for from 1-24, 2-24, 3-24, 4-24, 5-24, 6-24, 7-24, 8-24, 9-24, 10-24, 11-24, or 12-24 consecutive hours; from 1-30, 2-30, 3-30, 4-30, 5-30, 6-30, 7-30, 8-30, 9, −30, 10-30, 11-30, 12-30, 13-30, 14-30, 15-30, 16-30, 17-30, 18-30, 19-30, 20-30, 21-30, 22-30, 23-30, 24-30, 25-30, 26-30, 27-30, 28-30, or 29-30 consecutive days, 1-4, 2-4,or 3-4 consecutive weeks; or from 1-12, 2-12, 3-12, 4-12, 5-12, 6-12, 7-12, 8-12, 9-12, 10-12, or 11-12 consecutive months; followed by administration of a peptidomimetic macrocycle for from 1-24, 2-24, 3-24, 4-24, 5-24, 6-24, 7-24, 8-24, 9-24, 10-24, 11-24, or 12-24 consecutive hours; from 1-30, 2-30, 3-30, 4-30, 5-30, 6-30, 7-30, 8-30, 9, −30, 10-30, 11-30, 12-30, 13-30, 14-30, 15-30, 16-30, 17-30, 18-30, 19-30, 20-30, 21-30, 22-30, 23-30, 24-30, 25-30, 26-30, 27-30, 28-30, or 29-30 consecutive days, 1-4, 2-4,or 3-4 consecutive weeks; or from 1-12, 2-12, 3-12, 4-12, 5-12, 6-12, 7-12, 8-12, 9-12, 10-12, or 11-12 consecutive months, followed by an optional drug holiday of from 1-24, 2-24, 3-24, 4-24, 5-24, 6-24, 7-24, 8-24, 9-24, 10-24, 11-24, or 12-24 consecutive hours; from 1-30, 2-30, 3-30, 4-30, 5-30, 6-30, 7-30, 8-30, 9, −30, 10-30, 11-30, 12-30, 13-30, 14-30, 15-30, 16-30, 17-30, 18-30, 19-30, 20-30, 21-30, 22-30, 23-30, 24-30, 25-30, 26-30, 27-30, 28-30, or 29-30 consecutive days, 1-4, 2-4,or 3-4 consecutive weeks; or from 1-12, 2-12, 3-12, 4-12, 5-12, 6-12, 7-12, 8-12, 9-12, 10-12, or 11-12 consecutive months; followed by administration of a topoisomerase inhibitor.

[0453] In some embodiments, a peptidomimetic macrocycle will be administered first in the sequence, followed by an optional drug holiday, followed by administration of an additional pharmaceutically-active agent, for example, any additional therapeutic agent described herein. In some embodiments, a peptidomimetic macrocycle will be administered first in the sequence, followed by administration of an additional pharmaceutically-active agent, for example, any additional therapeutic agent described herein, followed by an optional drug holiday, followed by administration of a peptidomimetic macrocycle.

[0454] In some embodiments, a peptidomimetic macrocycle is administered for from 1-24, 2-24, 3-24, 4-24, 5-24, 6-24, 7-24, 8-24, 9-24, 10-24, 11-24, or 12-24 consecutive hours; from 1-30, 2-30, 3-30, 4-30, 5-30, 6-30, 7-30, 8-30, 9, −30, 10-30, 11-30, 12-30, 13-30, 14-30, 15-30, 16-30, 17-30, 18-30, 19-30, 20-30, 21-30, 22-30, 23-30, 24-30, 25-30, 26-30, 27-30, 28-30, or 29-30 consecutive days, 1-4, 2-4,or 3-4 consecutive weeks; or from 1-12, 2-12, 3-12, 4-12, 5-12, 6-12, 7-12, 8-12, 9-12, 10-12, or 11-12 consecutive months, followed by an optional drug holiday; followed by administration of an additional pharmaceutically-active agent, for example, any additional therapeutic agent described herein, for from 1-24, 2-24, 3-24, 4-24, 5-24, 6-24, 7-24, 8-24, 9-24, 10-24, 11-24, or 12-24 consecutive hours; from 1-30, 2-30, 3-30, 4-30, 5-30, 6-30, 7-30, 8-30, 9, −30, 10-30, 11-30, 12-30, 13-30, 14-30, 15-30, 16-30, 17-30, 18-30, 19-30, 20-30, 21-30, 22-30, 23-30, 24-30, 25-30, 26-30, 27-30, 28-30, or 29-30 consecutive days, 1-4, 2-4,or 3-4 consecutive weeks; or from 1-12, 2-12, 3-12, 4-12, 5-12, 6-12, 7-12, 8-12, 9-12, 10-12, or 11-12 consecutive months. For example, a peptidomimetic macrocycle is administered for from 1-24, 2-24, 3-24, 4-24, 5-24, 6-24, 7-24, 8-24, 9-24, 10-24, 11-24, or 12-24 consecutive hours; from 1-30, 2-30, 3-30, 4-30, 5-30, 6-30, 7-30, 8-30, 9, −30, 10-30, 11-30, 12-30, 13-30, 14-30, 15-30, 16-30, 17-30, 18-30, 19-30, 20-30, 21-30, 22-30, 23-30, 24-30, 25-30, 26-30, 27-30, 28-30, or 29-30 consecutive days, 1-4, 2-4,or 3-4 consecutive weeks; or from 1-12, 2-12, 3-12, 4-12, 5-12, 6-12, 7-12, 8-12, 9-12, 10-12, or 11-12 consecutive months; followed by a drug holiday of from 1-24, 2-24, 3-24, 4-24, 5-24, 6-24, 7-24, 8-24, 9-24, 10-24, 11-24, or 12-24 consecutive hours; from 1-30, 2-30, 3-30, 4-30, 5-30, 6-30, 7-30, 8-30, 9, −30, 10-30, 11-30, 12-30, 13-30, 14-30, 15-30, 16-30, 17-30, 18-30, 19-30, 20-30, 21-30, 22-30, 23-30, 24-30, 25-30, 26-30, 27-30, 28-30, or 29-30 consecutive days, 1-4, 2-4,or 3-4 consecutive weeks; or from 1-12, 2-12, 3-12, 4-12, 5-12, 6-12, 7-12, 8-12, 9-12, 10-12, or 11-12 consecutive months; followed by administration of a topoisomerase inhibitor for from 1-24, 2-24, 3-24, 4-24, 5-24, 6-24, 7-24, 8-24, 9-24, 10-24, 11-24, or 12-24 consecutive hours; from 1-30, 2-30, 3-30, 4-30, 5-30, 6-30, 7-30, 8-30, 9, −30, 10-30, 11-30, 12-30, 13-30, 14-30, 15-30, 16-30, 17-30, 18-30, 19-30, 20-30, 21-30, 22-30, 23-30, 24-30, 25-30, 26-30, 27-30, 28-30, or 29-30 consecutive days, 1-4, 2-4,or 3-4 consecutive weeks; or from 1-12, 2-12, 3-12, 4-12, 5-12, 6-12, 7-12, 8-12, 9-12, 10-12, or 11-12 consecutive months.

[0455] In some embodiments, a peptidomimetic macrocycle is administered from 1-24, 2-24, 3-24, 4-24, 5-24, 6-24, 7-24, 8-24, 9-24, 10-24, 11-24, or 12-24 consecutive hours; from 1-30, 2-30, 3-30, 4-30, 5-30, 6-30, 7-30, 8-30, 9, −30, 10-30, 11-30, 12-30, 13-30, 14-30, 15-30, 16-30, 17-30, 18-30, 19-30, 20-30, 21-30, 22-30, 23-30, 24-30, 25-30, 26-30, 27-30, 28-30, or 29-30 consecutive days, 1-4, 2-4,or 3-4 consecutive weeks; or from 1-12, 2-12, 3-12, 4-12, 5-12, 6-12, 7-12, 8-12, 9-12, 10-12, or 11-12 consecutive months, followed by administration of an additional pharmaceutically-active agent, for example, any additional therapeutic agent described herein, for from 1-24, 2-24, 3-24, 4-24, 5-24, 6-24, 7-24, 8-24, 9-24, 10-24, 11-24, or 12-24 consecutive hours; from 1-30, 2-30, 3-30, 4-30, 5-30, 6-30, 7-30, 8-30, 9, −30, 10-30, 11-30, 12-30, 13-30, 14-30, 15-30, 16-30, 17-30, 18-30, 19-30, 20-30, 21-30, 22-30, 23-30, 24-30, 25-30, 26-30, 27-30, 28-30, or 29-30 consecutive days, 1-4, 2-4,or 3-4 consecutive weeks; or from 1-12, 2-12, 3-12, 4-12, 5-12, 6-12, 7-12, 8-12, 9-12, 10-12, or 11-12 consecutive months, followed by an optional drug holiday; followed by administration of a peptidomimetic macrocycle. For example, a peptidomimetic macrocycle is administered for from 1-24, 2-24, 3-24, 4-24, 5-24, 6-24, 7-24, 8-24, 9-24, 10-24, 11-24, or 12-24 consecutive hours; from 1-30, 2-30, 3-30, 4-30, 5-30, 6-30, 7-30, 8-30, 9, −30, 10-30, 11-30, 12-30, 13-30, 14-30, 15-30, 16-30, 17-30, 18-30, 19-30, 20-30, 21-30, 22-30, 23-30, 24-30, 25-30, 26-30, 27-30, 28-30, or 29-30 consecutive days, 1-4, 2-4,or 3-4 consecutive weeks; or from 1-12, 2-12, 3-12, 4-12, 5-12, 6-12, 7-12, 8-12, 9-12, 10-12, or 11-12 consecutive months; followed by administration of a topoisomerase inhibitor for from 1-24, 2-24, 3-24, 4-24, 5-24, 6-24, 7-24, 8-24, 9-24, 10-24, 11-24, or 12-24 consecutive hours; from 1-30, 2-30, 3-30, 4-30, 5-30, 6-30, 7-30, 8-30, 9, −30, 10-30, 11-30, 12-30, 13-30, 14-30, 15-30, 16-30, 17-30, 18-30, 19-30, 20-30, 21-30, 22-30, 23-30, 24-30, 25-30, 26-30, 27-30, 28-30, or 29-30 consecutive days, 1-4, 2-4,or 3-4 consecutive weeks; or from 1-12, 2-12, 3-12, 4-12, 5-12, 6-12, 7-12, 8-12, 9-12, 10-12, or 11-12 consecutive months, followed by an optional drug holiday of from 1-24, 2-24, 3-24, 4-24, 5-24, 6-24, 7-24, 8-24, 9-24, 10-24, 11-24, or 12-24 consecutive hours; from 1-30, 2-30, 3-30, 4-30, 5-30, 6-30, 7-30, 8-30, 9, −30, 10-30, 11-30, 12-30, 13-30, 14-30, 15-30, 16-30, 17-30, 18-30, 19-30, 20-30, 21-30, 22-30, 23-30, 24-30, 25-30, 26-30, 27-30, 28-30, or 29-30 consecutive days, 1-4, 2-4,or 3-4 consecutive weeks; or from 1-12, 2-12, 3-12, 4-12, 5-12, 6-12, 7-12, 8-12, 9-12, 10-12, or 11-12 consecutive months; followed by administration of a peptidomimetic macrocycle.

[0456] In some embodiments, an additional pharmaceutically-active agent, for example, any additional therapeutic agent described herein, will be administered first in the sequence, followed by an optional drug holiday, followed by administration of a peptidomimetic macrocycle. In some embodiments, a topoisomerase inhibitor will be administered first in the sequence, followed by an optional drug holiday, followed by administration of a peptidomimetic macrocycle, followed by an optional drug holiday, followed by administration of a topoisomerase inhibitor.

[0457] In some embodiments, an additional pharmaceutically-active agent, for example, any additional therapeutic agent described herein, is administered for from 1 to 30 consecutive days, followed by an optional drug holiday, followed by administration of peptidomimetic macrocycle for from 1 to 30 consecutive days. In some embodiments, an additional pharmaceutically-active agent, for example, any additional therapeutic agent described herein, is administered for from 1 to 21 consecutive days, followed by an optional drug holiday, followed by administration of a peptidomimetic macrocycle for from 1 to 21 consecutive days. In some embodiments, an additional pharmaceutically-active agent, for example, any additional therapeutic agent described herein, is administered for from 1 to 14 consecutive days, followed by an optional drug holiday, followed by administration of a peptidomimetic macrocycle for from 1 to 14 consecutive days. In some embodiments, an additional pharmaceutically-active agent, for example, any additional therapeutic agent described herein, is administered for 14 consecutive days, followed by an optional drug holiday, followed by administration of a peptidomimetic macrocycle for 7 consecutive days. In some embodiments, an additional pharmaceutically-active agent, for example, any additional therapeutic agent described herein, is administered for 7 consecutive days, followed by an optional drug holiday, followed by administration of a peptidomimetic macrocycle for 7 consecutive days.

[0458] In some embodiments, a peptidomimetic macrocycle is administered for from 1 to 30 consecutive days, followed by an optional drug holiday, followed by administration of an additional pharmaceutically-active agent, for example, any additional therapeutic agent described herein, for from 1 to 30 consecutive days. In some embodiments, a peptidomimetic macrocycle is administered for from 1 to 21 consecutive days, followed by an optional drug holiday, followed by administration of an additional pharmaceutically-active agent, for example, any additional therapeutic agent described herein, for from 1 to 21 consecutive days. In some embodiments, a peptidomimetic macrocycle is administered for from 1 to 14 consecutive days, followed by an optional drug holiday, followed by administration of an additional pharmaceutically-active agent, for example, any additional therapeutic agent described herein, for from 1 to 14 consecutive days. In some embodiments, a peptidomimetic macrocycle is administered for 14 consecutive days, followed by an optional drug holiday, followed by administration of an additional pharmaceutically-active agent, for example, any additional therapeutic agent described herein, for 14 consecutive days. In some embodiments, a peptidomimetic macrocycle is administered for 7 consecutive days, followed by an optional drug holiday, followed by administration of an additional pharmaceutically-active agent, for example, any additional therapeutic agent described herein, for 7 consecutive days.

[0459] In some embodiments, one of a peptidomimetic macrocycle and an additional pharmaceutically-active agent, for example, any additional therapeutic agent described herein, is administered for from 2 to 30 consecutive days, followed by an optional drug holiday, followed by administration of the other of a peptidomimetic macrocycle and an additional pharmaceutically-active agent from between 2 to 30 consecutive days. In some embodiments, one of a peptidomimetic macrocycle and an additional pharmaceutically-active agent, for example, any additional therapeutic agent described herein, is administered for from 2 to 21 consecutive days, followed by an optional drug holiday, followed by administration of the other of a peptidomimetic macrocycle and an additional pharmaceutically-active agent for from 2 to 21 consecutive days. In some embodiments, one of a peptidomimetic macrocycle and an additional pharmaceutically-active agent, for example, any additional therapeutic agent described herein, is administered for from 2 to 14 consecutive days, followed by a drug holiday of from 1 to 14 days, followed by administration of the other of a peptidomimetic macrocycle and an additional pharmaceutically-active agent for from 2 to 14 consecutive days. In some embodiments, one of a peptidomimetic macrocycle and an additional pharmaceutically-active agent, for example, any additional therapeutic agent described herein, is administered for from 3 to 7 consecutive days, followed by a drug holiday of from 3 to 10 days, followed by administration of the other of a peptidomimetic macrocycle and an additional pharmaceutically-active agent for from 3 to 7 consecutive days.

[0460] In some embodiments, a peptidomimetic macrocycle is administered once, twice, or thrice daily for 2, 3, 4, 5, 6, 7, 8, 9, 10, 11, 12, 13, 14, 15, 16, 17, 18, 19, 20, 21, 22, 23, 24, 25, 26, 27, 28, 29, or 30, consecutive days followed by 0, 1, 2, 3, 4, 5, 6, 7, 8, 9, 10, 11, 12, 13, 14, 15, 16, 17, 18, 19, 20, 21, 22, 23, 24, 25, 26, 27, 28, 29, or 30 days of rest (e.g., no administration of the peptidomimetic macrocycle/discontinuation of treatment) in a 1, 2, 3, 4, 5, 6, 7, 8, 9, 10, 11, 12, 13, 14, 15, 16, 17, 18, 19, 20, 21, 22, 23, 24, 25, 26, 27, 28, 29, or 30 day cycle; and the additional pharmaceutically-active agent, for example, any additional therapeutic agent described herein, is administered prior to, concomitantly with, or subsequent to administration of the peptidomimetic macrocycle on one or more days (e.g., on day 1 of cycle 1). In some embodiments, the combination therapy is administered for 1, 2, 3, 4, 5, 6, 7, 8, 9, 10, 12, or 13 cycles of 1, 2, 3, 4, 5, 6, 7, 8, 9, 10, 11, 12, 13, 14, 15, 16, 17, 18, 19, 20, 21, 22, 23, 24, 25, 26, 27, 28, or more days. In some embodiments, the combination therapy is administered for 1 to 12 or 13 cycles of 28 days (e.g., about 12 months).

[0461] In some embodiments, the components of the combination therapies described herein (e.g., a peptidomimetic macrocycle and any additional therapeutic agent disclosed herein) are cyclically administered to a patient. In some embodiments, a secondary active agent is co-administered in a cyclic administration with the combination therapies provided herein. Cycling therapy involves the administration of an active agent for a period of time, followed by a rest for a period of time, and repeating this sequential administration. Cycling therapy can be performed independently for each active agent (e.g., a peptidomimetic macrocycle and an additional pharmaceutically-active agent, and/or a secondary agent) over a prescribed duration of time. In some embodiments, the cyclic administration of each active agent is dependent upon one or more of the active agents administered to the subject. In some embodiments, administration of a peptidomimetic macrocycle or an additional pharmaceutically-active agent, for example, any therapeutic agent disclosed herein, fixes the day(s) or duration of administration of the peptidomimetic macrocycle and the additional therapeutically-active agent.

[0462] In some embodiments, the frequency of administration is in the range of about a daily dose to about a monthly dose. In some embodiments, administration is once a day, twice a day, three times a day, four times a day, once every other day, twice a week, once every week, once every two weeks, once every three weeks, or once every four weeks. In some embodiments, a compound for use in combination therapies described herein is administered once a day. In some embodiments, a compound for use in combination therapies described herein is administered twice a day. In some embodiments, a compound for use in combination therapies described herein is administered three times a day. In some embodiments, a compound for use in combination therapies described herein is administered four times a day.

[0463] In some embodiments, the frequency of administration of a peptidomimetic macrocycle is in the range of about a daily dose to about a monthly dose. In some embodiments, administration of a peptidomimetic macrocycle is once a day, twice a day, three times a day, four times a day, once every other day, twice a week, once every week, once every two weeks, once every three weeks, or once every four weeks. In some embodiments, a peptidomimetic macrocycle for use in combination therapies described herein is administered once a day. In some embodiments, a peptidomimetic macrocycle for use in combination therapies described herein is administered twice a day. In some embodiments, a peptidomimetic macrocycle for use in combination therapies described herein is administered three times a day. In some embodiments, a peptidomimetic macrocycle for use in combination therapies described herein is administered four times a day.

[0464] In some embodiments, the frequency of administration of an additional pharmaceutically-active agent, for example, any additional therapeutic agent described herein, is in the range of about a daily dose to about a monthly dose. In some embodiments, administration of an additional pharmaceutically-active agent, for example, any additional therapeutic agent described herein, is once a day, twice a day, three times a day, four times a day, once every other day, twice a week, once every week, once every two weeks, once every three weeks, or once every four weeks.

[0465] In some embodiments, an additional pharmaceutically-active agent, for example, any additional therapeutic agent described herein, for use in combination therapies described herein is administered once a day. In some embodiments, an additional pharmaceutically-active agent, for example, any additional therapeutic agent described herein, for use in combination therapies described herein is administered twice a day. In some embodiments, an additional pharmaceutically-active agent, for example, any additional therapeutic agent described herein, for use in combination therapies described herein is administered three times a day. In some embodiments, an additional pharmaceutically-active agent, for example, any additional therapeutic agent described herein, for use in combination therapies described herein is administered four times a day.

[0466] In some embodiments, a compound for use in combination therapies described herein is administered once per day from one day to six months, from one week to three months, from one week to four weeks, from one week to three weeks, or from one week to two weeks. In some embodiments, a compound for use in combination therapies described herein is administered once per day for one week, two weeks, three weeks, or four weeks. In some embodiments, a compound for use in combination therapies described herein is administered once per day for one week. In some embodiments, a compound for use in combination therapies described herein is administered once per day for two weeks. In some embodiments, a compound for use in combination therapies described herein is administered once per day for three weeks. In some embodiments, a compound for use in combination therapies described herein is administered once per day for four weeks.

[0467] Therapeutic compositions may be administered 1, 2, 3, 4, 5, 6, 7, 8, 9, 10, 11, 12, 13, 14, 15, 16, 17, 18, 19, 20 or more times, and they may be administered every 1, 2, 3, 4, 5, 6, 7, 8, 9, 10, 11, 12, 13, 14, 15, 16, 17, 18, 19, 20, 21, 22, 23, 24 hours, or 1, 2, 3, 4, 5, 6, 7 days, or 1, 2, 3, 4, 5 weeks, or 1, 2, 3, 4, 5, 6, 7, 8, 9, 10, 11, 12 months.

[0468] In some embodiments, the periodic administration of a peptidomimetic macrocycle and/or the additional pharmaceutically-active agent, for example, any additional therapeutic agent described herein, is affected daily. In some embodiments, the periodic administration of a peptidomimetic macrocycle and/or the additional pharmaceutically-active agent, for example, any additional therapeutic agent described herein, is affected twice daily at one half the amount.

[0469] In some embodiments, the periodic administration of a peptidomimetic macrocycle and/or the additional pharmaceutically-active agent, for example, any additional therapeutic agent described herein, is affected once every 3 to 11 days; or once every 5 to 9 days; or once every 7 days; or once every 24 hours. In some embodiments, the periodic administration of a peptidomimetic macrocycle and/or the additional pharmaceutically-active agent, for example, any additional therapeutic agent described herein, is effected once every 2 days, 3 days, 4 days, 5 days, 6 days, 7 days, 8 days, 9 days, 10 days, 11 days, 12 days, 13 days, 14 days, 15 days, 6 days, 16 days, 17 days, 18 days, 19 days, 20 days, 21 days, 22 days, 23 days, 24 days, 25 days, 26 days, 27 days, 28 days, 29 days, or 30 days.

[0470] In some embodiments, the periodic administration of a peptidomimetic macrocycle and/or additional pharmaceutically-active agent is affected one, twice, or thrice daily.

[0471] For each administration schedule of a peptidomimetic macrocycle, the periodic administration of the additional pharmaceutically-active agent, for example, any additional therapeutic agent described herein, may be affected once every 16-32 hours; or once every 18-30 hours; or once every 20-28 hours; or once every 22-26 hours. In some embodiments, the administration of a peptidomimetic macrocycle substantially precedes the additional pharmaceutically-active agent, for example, any additional therapeutic agent described herein. In some embodiments, the administration of the additional pharmaceutically-active agent, for example, any additional therapeutic agent described herein, substantially precedes the administration of a peptidomimetic macrocycle.

[0472] In some embodiments, a peptidomimetic macrocycle and the additional pharmaceutically-active agent, for example, any additional therapeutic agent described herein, may be administered for a period of time of at least 4 days. In some embodiments, the period of time may be 5 days to 5 years; or 10 days to 3 years; or 2 weeks to 1 year; or 1 month to 6 months; or 3 months to 4 months. In some embodiments, a peptidomimetic macrocycle and the additional pharmaceutically-active agent, for example, any additional therapeutic agent described herein, may be administered for the lifetime of the subject.

[0473] In some embodiments, a peptidomimetic macrocycle and the additional pharmaceutically-active agent, for example, any additional therapeutic agent described herein, are administered during a treatment period. A treatment period disclosed herein can be, for example, a 1, 2, 3, 4, 5, 6, 7, 8, 9, 10, 12, 13, 14, 15, 16, 17, 18, 19, 20, 21, 22, 23, 24, 25, 26, 27, 28, 29, or 30-day treatment period. The first day of a treatment period can be denoted as, for example, day 0 or day 1. For example, a 22-day treatment period can begin on day 0 and end on day 21. In another example, a 22-day treatment period can begin on day 1 and end on day 22. A peptidomimetic macrocycle and/or an additional pharmaceutically-active agent, for example, any additional therapeutic agent described herein can be administered on any of Days 0, 1, 2, 3, 4, 5, 6, 7, 8, 9, 10, 12, 13, 14, 15, 16, 17, 18, 19, 20, 21, 22, 23, 24, 25, 26, 27, 28, 29, and/or 30 of a treatment period. A peptidomimetic macrocycle and/or an additional pharmaceutically-active agent, for example, any additional therapeutic agent described herein can be administered on one or more days of a treatment period. In some instances, neither a peptidomimetic macrocycle or an additional pharmaceutically-active agent is administered on one or more days of a treatment period. In some instances, the peptidomimetic macrocycle and the additional pharmaceutically-active agent, for example, any additional therapeutic agent described herein are both administered on some days of a treatment period while on other days of the treatment period only one of the macrocycle or the additional pharmaceutically-active agent is administered. For example, a peptidomimetic macrocycle can be administered on Days 1, 2, 3, 4, and 5 of a treatment period and an additional pharmaceutically-active agent (e.g., any additional therapeutic agent described herein) can be administered on Days 2, 3, 4, 5, and 6 of the treatment period. In some embodiments, a peptidomimetic macrocycle can be administered on Days 0, 1, 2, 3, and 4 of a treatment period and an additional pharmaceutically-active agent (e.g., any additional therapeutic agent described herein) can be administered on Days 1, 2, 3, 4, and 5 of the treatment period. In some embodiments, a peptidomimetic macrocycle can be administered on Days 0, 1, and 2 of a treatment period and an additional pharmaceutically-active agent (e.g., any additional therapeutic agent described herein) can be administered on Day 1 of the treatment period. In some embodiments, a peptidomimetic macrocycle can be administered on Days 1, 2, and 3 of a treatment period and an additional pharmaceutically-active agent (e.g., any additional therapeutic agent described herein) can be administered on Day 2 of the treatment period.

[0474] In some embodiments, a treatment period is part of a treatment cycle. For example, during a cycle denoted to begin on Day 1 and end on Day 22, a peptidomimetic macrocycle can be administered on days 1, 2, 3, 4, and 5 of the cycle, an additional pharmaceutically-active agent (e.g., any additional therapeutic agent described herein) can be administered on days 2, 3, 4, 5, and 6 of the cycle, and neither the macrocycle nor the additional agent can be administered on days 7-22 of the cycle.

[0475] In another example, a peptidomimetic macrocycle can be administered on days 1, 2, and 3 of a cycle denoted to begin on Day 1 and end on Day 22, an additional pharmaceutically-active agent can be administered on day 2 of the cycle, and neither the macrocycle nor the additional agent can be administered on days 4-22 of the cycle.

[0476] In some embodiments, multiple treatment cycles can be administered. For example, method disclosed herein can comprise administering 1, 2, 3, 4, 5, 6, 7, 8, 9, 10, 11, 12, 13, 14, 15 or more treatment cycles. In some embodiments, a method disclosed herein comprises administering at least 1, at least 2, at least 3, at least 4, at least 5, at least 6, at least 7, at least 8, at least 9, at least 10, at least 11, at least 12, at least 13, at least 14, or at least 15 treatment cycles. In some embodiments, a method of the disclosure comprises administering a peptidomimetic macrocycle in combination with topotecan according to the example treatment schedule shown, below, with the number of administered treatment cycles varying:

| | | | | | Days without |
|---|---|---|---|---|---|
| | | | Macrocycle | Topotecan | Administration |
| Treatment | Cycle | Cycle | Administration | Administration | of Macrocycle |
| Cycle Number | Start* | End | Days | Days | or Topotecan |
| 1 | Day 1 | Day 22 | Days 1-5 | Days 2-6 | Days 7-22 |
| 2 | Day 23 | Day 44 | Days 23-27 | Days 24-28 | Days 29-44 |
| 3 | Day 45 | Day 66 | Days 45-49 | Days 46-50 | Days 51-66 |
| 4 | Day 67 | Day 88 | Days 67-71 | Days 68-72 | Days 73-88 |
| 5 | Day 89 | Day 110 | Days 89-93 | Days 90-94 | Days 95-110 |
| 6 | Day 111 | Day 132 | Days 111-115 | Days 112-116 | Days 117-132 |
| 7 | Day 133 | Day 154 | Days 133-137 | Days 134-138 | Days 139-154 |
| 8 | Day 155 | Day 176 | Days 155-159 | Days 156-160 | Days 161-176 |
| 9 | Day 177 | Day 198 | Days 177-181 | Days 178-182 | Days 183-198 |
| 10 | Day 199 | Day 220 | Days 199-203 | Days 200-204 | Days 205-220 |
| 11 | Day 221 | Day 242 | Days 221-225 | Days 222-226 | Days 227-242 |
| 12 | Day 243 | Day 264 | Days 243-247 | Days 244-248 | Days 249-264 |
| 13 | Day 265 | Day 286 | Days 265-269 | Days 266-270 | Days 271-286 |
| 14 | Day 287 | Day 308 | Days 287-291 | Days 288-292 | Days 293-308 |
| 15 | Day 309 | Day 330 | Days 309-313 | Days 310-314 | Days 315-330 |

*Day 1 is denoted as the day in which the peptidomimetic macrocycle is first administered to a subject. Each subsequent day in time is then numbered consecutively.

[0477] In some embodiments, a method of the disclosure comprises administering a peptidomimetic macrocycle in combination with docetaxel according to the example treatment schedule shown, below, with the number of administered treatment cycles varying:

| | | | | | Days without |
|---|---|---|---|---|---|
| | | | Macrocycle | Docetaxel | Administration |
| Treatment | Cycle | Cycle | Administration | Administration | of Macrocycle |
| Cycle Number | Start* | End | Days | Days | or Docetaxel |
| 1 | Day 1 | Day 22 | Days 1-3 | Day 2 | Days 4-22 |
| 2 | Day 23 | Day 44 | Days 23-25 | Day 24 | Days 26-44 |
| 3 | Day 45 | Day 66 | Days 45-47 | Day 46 | Days 48-66 |
| 4 | Day 67 | Day 88 | Days 67-69 | Day 68 | Days 70-88 |
| 5 | Day 89 | Day 110 | Days 89-91 | Day 90 | Days 92-110 |
| 6 | Day 111 | Day 132 | Days 111-113 | Day 112 | Days 114-132 |
| 7 | Day 133 | Day 154 | Days 133-135 | Day 134 | Days 136-154 |
| 8 | Day 155 | Day 176 | Days 155-157 | Day 156 | Days 158-176 |
| 9 | Day 177 | Day 198 | Days 177-179 | Day 178 | Days 180-198 |
| 10 | Day 199 | Day 220 | Days 199-201 | Day 200 | Days 202-220 |
| 11 | Day 221 | Day 242 | Days 221-223 | Day 222 | Days 224-242 |
| 12 | Day 243 | Day 264 | Days 243-245 | Day 244 | Days 246-264 |
| 13 | Day 265 | Day 286 | Days 265-267 | Day 266 | Days 268-286 |
| 14 | Day 287 | Day 308 | Days 287-289 | Day 288 | Days 290-308 |
| 15 | Day 309 | Day 330 | Days 309-311 | Day 310 | Days 312-330 |

*Day 1 is denoted as the day in which the peptidomimetic macrocycle is first administered to a subject. Each subsequent day in time is then numbered consecutively.

[0478] In some embodiments, the peptidomimetic macrocycle and/or additional pharmaceutically-active agent is administered gradually over a period of time. A desired amount of peptidomimetic macrocycle or additional pharmaceutically-active agent can be administered gradually over a period of from about 0.1 h-24 h. In some cases a desired amount of peptidomimetic macrocycle or additional pharmaceutically-active agent is administered gradually over a period of 0.1 h, 0.5 h, 1 h, 1.5 h, 2 h, 2.5 h, 3 h, 3.5 h, 4 h, 4.5 h, 5 h, 6 h, 7 h, 8 h, 9 h, 10 h, 11 h, 12 h, 13 h, 14 h, 15 h, 16 h, 17 h, 18 h, 19 h, 20 h, 21 h, 22 h, 23 h, or 24 h. In some examples, a desired amount of peptidomimetic macrocycle or additional pharmaceutically-active agent is administered gradually over a period of 0.25-12 h, for example over a period of 0.25-1 h, 0.25-2 h, 0.25-3 h, 0.25-4 h, 0.25-6 h, 0.25-8 h, 0.25-10 h. In some examples, a desired amount of peptidomimetic macrocycle or additional pharmaceutically-active agent is administered gradually over a period of 0.25-2 h. In some examples, a desired amount of a peptidomimetic macrocycle or additional pharmaceutically-active agent is administered gradually over a period of 0.25-1 h. In some examples, a desired amount of a peptidomimetic macrocycle or additional pharmaceutically-active agent is administered gradually over a period of 0.25 h, 0.3 h, 0.4 h, 0.5 h, 0.6 h, 0.7 h, 0.8 h, 0.9 h, 1.0 h, 1.1 h, 1.2 h, 1.3 h, 1.4 h, 1.5 h, 1.6 h, 1.7 h, 1.8 h, 1.9 h, or 2.0 h. In some examples, a desired amount of a peptidomimetic macrocycle or additional pharmaceutically-active agent is administered gradually over a period of 1 h. In some examples, a desired amount of a peptidomimetic macrocycle or additional pharmaceutically-active agent is administered gradually over a period of 2 h.

[0479] Administration of the peptidomimetic macrocycles and/or additional pharmaceutically-active agent can continue as long as necessary to treat a cancer in a subject in need thereof. In some embodiments, one or more peptidomimetic macrocycles of the disclosure or an additional pharmaceutically-active agent is administered for more than 1 day, 1 week, 1 month, 2 months, 3 months, 4 months, 5 months, 6 months, 7 months, 8 months, 9 months, 10 months, 11 months, 12 months, 13 months, 14 months, 15 months, 16 months, 17 months, 18 months, 19 months, 20 months, 21 months, 22 months, 23 months, or 24 months. In some embodiments, one or more peptidomimetic macrocycle of the disclosure is administered for less than 1 week, 1 month, 2 months, 3 months, 4 months, 5 months, 6 months, 7 months, 8 months, 9 months, 10 months, 11 months, 12 months, 13 months, 14 months, 15 months, 16 months, 17 months, 18 months, 19 months, 20 months, 21 months, 22 months, 23 months, or 24 months.

[0480] In some embodiments, one or more peptidomimetic macrocycles of the disclosure and/or an additional pharmaceutically-active agent, for example any additional therapeutic agent disclosed herein, is administered chronically on an ongoing basis. In some embodiments, administration of one or more peptidomimetic macrocycle of the disclosure is continued until documentation of disease progression, unacceptable toxicity, or patient or physician decision to discontinue administration.

### Effects of Combination Treatment

[0481] In some embodiments, the administration of the peptidomimetic macrocycles and one or more additional therapies in accordance with the methods presented herein have an additive effect relative the administration of the peptidomimetic macrocycles or said one or more additional therapies alone. In some embodiments, the administration of the peptidomimetic macrocycles and one or more additional therapies in accordance with the methods presented herein have a synergistic effect relative to the administration of the peptidomimetic macrocycles or said one or more additional therapies alone.

[0482] In some embodiments, administration of the peptidomimetic macrocycles in combination with one or more additional therapies (e.g., pharmaceutically-active agents) has a synergistic effect. In some embodiments, a synergistic effect of two or more agents (e.g. a peptidomimetic macrocycle and any additional pharmaceutically-active agent disclosed herein) is an effect of the combination of the two or more agents, which effect is greater than the additive effects of the two or more agents. In some embodiments; a synergistic effect of a combination therapy permits the use of lower dosages (e.g., sub-optimal doses) of the peptidomimetic macrocycles or an additional therapy and/or less frequent administration of the peptidomimetic macrocycles or an additional therapy to a subject. In some embodiments, the ability to utilize lower dosages of the peptidomimetic macrocycles or of an additional therapy and/or to administer the peptidomimetic macrocycles or said additional therapy less frequently reduces the toxicity associated with the administration of the peptidomimetic macrocycles or of said additional therapy to a subject without reducing the efficacy of the peptidomimetic macrocycles or of said additional therapy in the treatment of cancer. In some embodiments, a synergistic effect results in improved efficacy of the peptidomimetic macrocycles and each of said additional therapies in treating cancer.

[0483] In some embodiments, a synergistic effect of a combination of the peptidomimetic macrocycles and one or more additional therapies (e.g., pharmaceutically-active agents) avoids or reduces adverse or unwanted side effects associated with the use of any single therapy. Non-limiting examples of side effects that can be reduced by a synergistic effect of a combination of a peptidomimetic macrocycle of the disclosure and an additional therapy are mucositis, side effects associated with myelosuppression such as neutropenia and thrombocytopenia; neurotoxicity, diarrhea, hair loss, vomiting, and nausea. In some embodiments, a synergistic effect of a combination of a peptidomimetic macrocycle of the disclosure and one or more additional therapies is a myelopreservative effect. In some embodiments, a reduction in mucositis, neutropenia, thrombocytopenia, or myelosuppression is due to peptidomimetic macrocycle-induced cell cycle arrest in tissues such as, for example, bone marrow and/or digestive tract tissue. In some embodiments, the reduction in side effects caused by a combination of a peptidomimetic macrocycle of the disclosure and an additional therapy allows for an increase in the maximum tolerated dose of the peptidomimetic macrocycle or additional therapy compared to the maximum tolerated dose of the peptidomimetic macrocycle or additional therapy when either the peptidomimetic macrocycle or additional therapy is administered alone.

[0484] In some embodiments, administration of a peptidomimetic macrocycle in combination with an additional pharmaceutically-active agent, for example any additional therapeutic agent disclosed herein, does not reduce an effect of the additional pharmaceutically-active agent. For example, expected survival and/or tumor growth inhibition in a subject can be the same following administration of the additional pharmaceutically-active agent alone or following administration of the additional pharmaceutically active agent in combination with a peptidomimetic macrocycle disclosed herein. In some embodiments, administration of a peptidomimetic macrocycle in combination with an additional pharmaceutically-active agent can reduce an effect (e.g. expected survival of a subject or tumor growth inhibition) of the additional pharmaceutically-active agent by less than about 1%, less than about 2%, less than about 3%, less than about 4%, less than about 5%, less than about 6%, less than about 7%, less than about 8%, less than about 9%, or less than about 10% compared to the effect caused by administration of the additional pharmaceutically-active agent alone.

### Additional Pharmaceutically-Active Agents

[0485] Additional therapies disclosed herein can include, for example, pharmaceutically-active agents. Non-limiting specific examples of pharmaceutically-active agents that can be used in combination with the peptidomimetic macrocycles include: hormonal agents (e.g., aromatase inhibitor, selective estrogen receptor modulator (SERM), and estrogen receptor antagonist), chemotherapeutic agents (e.g., microtubule disassembly blockers, antimetabolites, topoisomerase inhibitors, and DNA crosslinkers or damaging agents), and anti-antigenic agents (e.g., VEGF antagonists, receptor antagonists, integrin antagonists, vascular targeting agents (VTA)/vascular disrupting agents (VDA)). In some embodiments, an additional therapy disclosed herein is radiation therapy or conventional surgery.

[0486] Non-limiting examples of hormonal agents that can be used in combination with the peptidomimetic macrocycles include aromatase inhibitors, SERMs, and estrogen receptor antagonists. Hormonal agents that are aromatase inhibitors can be steroidal or no steroidal. Non-limiting examples of no steroidal hormonal agents include letrozole, anastrozole, aminoglutethimide, fadrozole, and vorozole. Non-limiting examples of steroidal hormonal agents include aromasin (exemestane), formestane, and testolactone. Non-limiting examples of hormonal agents that are SERMs include tamoxifen (branded/marketed as Nolvadex®), afimoxifene, arzoxifene, bazedoxifene, clomifene, femarelle, lasofoxifene, ormeloxifene, raloxifene, and toremifene. Non-limiting examples of hormonal agents that are estrogen receptor antagonists include fulvestrant. Other hormonal agents include but are not limited to abiraterone and lonaprisan.

[0487] Non-limiting examples of chemotherapeutic agents that can be used in combination with of peptidomimetic macrocycles include microtubule disassembly blockers, antimetabolites, topoisomerase inhibitors, and DNA crosslinkers or damaging agents. Chemotherapeutic agents that are microtubule disassembly blockers include, but are not limited to, taxanes (e.g., paclitaxel (branded/marketed as TAXOL®), docetaxel, eribulin, Abraxane®, larotaxel, ortataxel, and tesetaxel); epothilones (e.g., ixabepilone); and vinca alkaloids (e.g., vinorelbine, vinblastine, vindesine, and vincristine (branded/marketed as ONCOVIN®)).

[0488] Chemotherapeutic agents that are antimetabolites include, but are not limited to, folate antimetabolites (e.g., methotrexate, aminopterin, pemetrexed, raltitrexed); purine antimetabolites (e.g., cladribine, clofarabine, fludarabine, mercaptopurine, pentostatin, thioguanine); pyrimidine antimetabolites (e.g., 5-fluorouracil, capcitabine, gemcitabine (GEMZAR®), cytarabine, decitabine, floxuridine, tegafur, capecitabine); and deoxyribonucleotide antimetabolites (e.g., hydroxyurea).

[0489] Chemotherapeutic agents that are topoisomerase inhibitors include, but are not limited to, class I topoisomerase inhibitors such as topotecan (branded/marketed as HYCAMTIN®) irinotecan, rubitecan, and belotecan; class II topoisomerase inhibitors (e.g., etoposide or VP-16, and teniposide); anthracyclines (e.g., doxorubicin, epirubicin, Doxil, aclarubicin, amrubicin, daunorubicin, idarubicin, pirarubicin, valrubicin, and zorubicin); and anthracenediones (e.g., mitoxantrone, and pixantrone).

[0490] Chemotherapeutic agents that are DNA crosslinkers (or DNA damaging agents) include, but are not limited to, alkylating agents (e.g., cyclophosphamide, mechlorethamine, ifosfamide (branded/marketed as IFEX®), trofosfamide, chlorambucil, melphalan, prednimustine, bendamustine, uramustine, estramustine, carmustine (branded/marketed as BiCNU®), lomustine, semustine, fotemustine, nimustine, ranimustine, streptozocin, busulfan, mannosulfan, treosulfan, carboquone, N,N′N′-triethyl enethiophosphoramide, triaziquone, triethylenemelamine); alkylating-like agents (e.g., carboplatin (branded/marketed as PARAPLATIN®), cisplatin, oxaliplatin, nedaplatin, triplatin tetranitrate, satraplatin, picoplatin); nonclassical DNA crosslinkers (e.g., procarbazine, dacarbazine, temozolomide (branded/marketed as TEMODAR®), altretamine, mitobronitol); and intercalating agents (e.g., actinomycin, bleomycin, mitomycin, and plicamycin).

[0491] Non-limiting examples of other therapies that can be administered to a subject in combination with the peptidomimetic macrocycles include: (1) a statin such as lovastatin (e.g., branded/marketed as MEVACOR®); (2) an mTOR inhibitor such as sirolimus which is also known as Rapamycin (e.g., branded/marketed as RAPAMUNE®), temsirolimus (e.g., branded/marketed as TORISEL®), evorolimus (e.g., branded/marketed as AFINITOR®), and deforolimus; (3) a farnesyltransferase inhibitor agent such as tipifarnib; (4) an antifibrotic agent such as pirfenidone; (5) a pegylated interferon such as PEG-interferon alfa-2b; (6) a CNS stimulant such as methylphenidate (branded/marketed as RITALIN®); (7) a HER-2 antagonist such as anti-HER-2 antibody (e.g., trastuzumab) and kinase inhibitor (e.g., lapatinib); (8) an IGF-1 antagonist such as an anti-IGF-1 antibody (e.g., AVE1642 and IMC-A11) or an IGF-1 kinase inhibitor; (9) EGFR/HER-1 antagonist such as an anti-EGFR antibody (e.g., cetuximab, panitumamab) or EGFR kinase inhibitor (e.g., erlotinib; gefitinib); (10) SRC antagonist such as bosutinib; (11) cyclin dependent kinase (CDK) inhibitor such as seliciclib; (12) Janus kinase 2 inhibitor such as lestaurtinib; (13) proteasome inhibitor such as bortezomib; (14) phosphodiesterase inhibitor such as anagrelide; (15) inosine monophosphate dehydrogenase inhibitor such as tiazofurine; (16) lipoxygenase inhibitor such as masoprocol; (17) endothelin antagonist; (18) retinoid receptor antagonist such as tretinoin or alitretinoin; (19) immune modulator such as lenalidomide, pomalidomide, or thalidomide; (20) kinase (e.g., tyrosine kinase) inhibitor such as imatinib, dasatinib, erlotinib, nilotinib, gefitinib, sorafenib, sunitinib, lapatinib, or TG100801; (21) non-steroidal anti-inflammatory agent such as celecoxib (branded/marketed as CELEBREX®); (22) human granulocyte colony-stimulating factor (G-CSF) such as filgrastim (branded/marketed as NEUPOGEN®); (23) folinic acid or leucovorin calcium; (24) integrin antagonist such as an integrin a5p31-antagonist (e.g., JSM6427); (25) nuclear factor kappa beta (NF-κβ) antagonist such as OT-551, which is also an anti-oxidant. (26) hedgehog inhibitor such as CUR61414, cyclopamine, GDC-0449, and anti-hedgehog antibody; (27) histone deacetylase (HDAC) inhibitor such as SAHA (also known as vorinostat (branded/marketed as ZOLINZA)), PCI-24781, SB939, CHR-3996, CRA-024781, ITF2357, JNJ-26481585, or PCI-24781; (28) retinoid such as isotretinoin (e.g., branded/marketed as ACCUTANE®); (29) hepatocyte growth factor/scatter factor (HGF/SF) antagonist such as HGF/SF monoclonal antibody (e.g., AMG 102); (30) synthetic chemical such as antineoplaston; (31) anti-diabetic such as rosaiglitazone (e.g., branded/marketed as AVANDIA®); (32) antimalarial and amebicidal drug such as chloroquine (e.g., branded/marketed as ARALEN®); (33) synthetic bradykinin such as RMP-7; (34) platelet-derived growth factor receptor inhibitor such as SU-101; (35) receptor tyrosine kinase inhibitors of Flk-1/KDR/VEGFR2, FGFR1 and PDGFR beta such as SU5416 and SU6668; (36) anti-inflammatory agent such as sulfasalazine (e.g., branded/marketed as AZULFIDINE®); and (37) TGF-beta antisense therapy.

[0492] In some embodiments, an antineoplastic agent can be administered to a subject in combination with a peptidomimetic macrocycle. Non-limiting examples of antineoplastic agents can include topoisomerase inhibitors such as, for example, topotecan.

[0493] In some embodiments, a peptidomimetic macrocycles disclosed herein can inhibit one or more transporter enzymes (e.g., OATP1B1, OATP1B3, BSEP) at concentrations that can be clinically relevant. Therefore, such a peptidomimetic macrocycles disclosed herein can interact with medications that are predominantly cleared by hepatobiliary transporters. In some embodiments, methotrexate and statins (e.g., atorvastatin, fluvastatin lovastatin, pitavastatin pravastatin, rosuvastatin and simvastatin) are not dosed within 48 hrs, 36 hrs, 24 hrs, or 12 hrs ((for example within 24 hrs) of the administration of such a peptidomimetic macrocycle. Non-limiting examples of medications that can be affected by co-administration of such a peptidomimetic macrocycle disclosed herein are listed in the following table:

| Medication | Therapeutic Area |
|---|---|
| Irinotecan | Oncology |
| Bosentan | Pulmonary artery hypertension |
| Caspofungin | Antifungal |
| Methotrexate | Oncology & rheumatology |
| Repaglinide | Diabetes mellitus |
| Atorvastatin | Hypercholesterolemia |
| Cerivastatin | Hypercholesterolemia |
| Fluvastatin | Hypercholesterolemia |
| Lovastatin | Hypercholesterolemia |
| Pitavastatin | Hypercholesterolemia |
| Pravastatin | Hypercholesterolemia |
| Rosuvastatin | Hypercholesterolemia |
| Simvastatin | Hypercholesterolemia |

In some embodiments, one or more of the medications selected from the table above is not dosed within 48 hrs, 36 hrs, 24 hrs, or 12 hrs (for example within 24 h) of the administration of such a peptidomimetic macrocycle.

### Subject Response to Treatment

[0494] The effectiveness and/or response of cancer treatment by the methods disclosed herein can be determined by any suitable method. The response can be a complete response, and which can be an objective response, a clinical response, or a pathological response to treatment. The response can be a duration of survival (or probability of such duration) or progression-free interval. The timing or duration of such events can be determined from about the time of diagnosis, or from about the time treatment is initiated or from about the time treatment is finished (like the final administration of the peptidomimetic macrocycle and/or additional pharmaceutically-active agent). Alternatively, the response can be based upon a reduction in tumor size, tumor volume, or tumor metabolism, or based upon overall tumor burden, or based upon levels of serum markers especially where elevated in the disease state.

[0495] The response in individual patients can be characterized as a complete response, a partial response, stable disease, and progressive disease. In some embodiments, the response is complete response (CR). Complete response, in some examples can be defined as disappearance of all target lesions i.e. any pathological lymph nodes (whether target or non-target) must have reduction in short axis to <10 mm. In certain embodiments, the response is a partial response (PR). Partial response can be defined to mean at least 30% decrease in the sum of diameters of target lesions, taking as reference the baseline sum diameters. In some embodiments, the response is progressive disease (PD). Progressive disease can be defined as at least a 20% increase in the sum of diameters of target lesions, taking as reference the smallest sum on study (this includes the baseline sum if that is the smallest) and an absolute increase of at least 5 mm in the sum of diameters of target lesions. The appearance of one or more new lesions can also be considered as progression. In some embodiments, the disease can be stable disease (SD). Stable disease can be characterized by neither sufficient shrinkage to qualify for PR nor sufficient increase to qualify for PD, taking as reference the smallest sum diameters while on study. In certain embodiments, the response is a pathological complete response. A pathological complete response, e.g., as determined by a pathologist following examination of tissue removed at the time of surgery or biopsy, generally refers to an absence of histological evidence of invasive tumor cells in the surgical specimen.

[0496] In some embodiments, the effectiveness of methods disclosed herein are assessed by a level of adverse effect reduction seen in a subject or population of subjects. For example, the frequency and/or severity of neutropenia, thrombocytopenia, and/or other hematologic toxicity parameters can be assessed in subjects treated with a combination of a peptidomimetic macrocycle disclosed herein and an additional pharmaceutically-active agent (e.g., any additional therapeutic agent disclosed herein) and compared to the frequency and/or severity of the neutropenia, thrombocytopenia, and/or other hematologic toxicity parameters in subjects treated with the additional pharmaceutically-active agent alone. In some instances, the severity of adverse events is assessed using the Common Terminology Criteria for Adverse Events (CTCAE) grading scale.

### Assays

[0497] The properties of peptidomimetic macrocycles are assayed, for example, by using the methods described below. In some embodiments, a peptidomimetic macrocycle has improved biological properties relative to a corresponding polypeptide lacking the substituents described herein.

a. Assays to Determine α-Helicity

[0498] In solution, the secondary structure of polypeptides with α-helical domains will reach a dynamic equilibrium between random coil structures and α-helical structures, often expressed as a “percent helicity”. Thus, for example, alpha-helical domains are predominantly random coils in solution, with α-helical content usually under 25%. Peptidomimetic macrocycles with optimized linkers, on the other hand, possess, for example, an alpha-helicity that is at least two-fold greater than that of a corresponding uncrosslinked polypeptide. In some embodiments, macrocycles will possess an alpha-helicity of greater than 50%. To assay the helicity of peptidomimetic macrocycles, the compounds are dissolved in an aqueous solution (e.g. 50 mM potassium phosphate solution at pH 7, or distilled H₂O, to concentrations of 25-50 μM). Circular dichroism (CD) spectra are obtained on a spectropolarimeter using standard measurement parameters (e.g. temperature, 20° C.; wavelength, 190-260 nm; step resolution, 0.5 nm; speed, 20 nm/sec; accumulations, 10; response, 1 sec; bandwidth, 1 nm; path length, 0.1 cm). The α-helical content of each peptide is calculated by dividing the mean residue ellipticity (e.g. [ΦD]222obs) by the reported value for a model helical decapeptide.

b. Assay to Determine Melting Temperature (Tm)

[0499] A peptidomimetic macrocycle comprising a secondary structure such as an α-helix exhibits, for example, a higher melting temperature than a corresponding uncrosslinked polypeptide. Peptidomimetic macrocycles exhibit Tm of >60° C. representing a highly stable structure in aqueous solutions. To assay the effect of macrocycle formation on melting temperature, peptidomimetic macrocycles or unmodified peptides are dissolved in distilled H₂O (e.g. at a final concentration of 50 μM) and the Tm is determined by measuring the change in ellipticity over a temperature range (e.g. 4 to 95° C.) on a spectropolarimeter using standard parameters (e.g. wavelength 222 nm; step resolution, 0.5 nm; speed, 20 nm/sec; accumulations, 10; response, 1 sec; bandwidth, 1 nm; temperature increase rate: 1° C./min; path length, 0.1 cm).

c. Protease Resistance Assay

[0500] The amide bond of the peptide backbone is susceptible to hydrolysis by proteases, thereby rendering peptidic compounds vulnerable to rapid degradation in vivo. Peptide helix formation, however, buries the amide backbone and therefore can shield the amide from proteolytic cleavage. The peptidomimetic macrocycles can be subjected to in vitro trypsin proteolysis to assess for any change in degradation rate compared to a corresponding uncrosslinked polypeptide. For example, the peptidomimetic macrocycle and a corresponding uncrosslinked polypeptide are incubated with trypsin agarose and the reactions quenched at various time points by centrifugation and subsequent HPLC injection to quantitate the residual substrate by ultraviolet absorption at 280 nm. Briefly, the peptidomimetic macrocycle and peptidomimetic precursor (5 mcg) are incubated with trypsin agarose (S/E ˜125) for 0, 10, 20, 90, and 180 minutes. Reactions are quenched by tabletop centrifugation at high speed; remaining substrate in the isolated supernatant is quantified by HPLC-based peak detection at 280 nm. The proteolytic reaction displays first order kinetics and the rate constant, k, is determined from a plot of ln[S] versus time (k=−1×slope).

d. Ex Vivo Stability Assay

[0501] Peptidomimetic macrocycles with optimized linkers possess, for example, an ex vivo half-life that is at least two-fold greater than that of a corresponding uncrosslinked polypeptide, and possess an ex vivo half-life of 12 hours or more. For ex vivo serum stability studies, a variety of assays can be used. For example, a peptidomimetic macrocycle and a corresponding uncrosslinked polypeptide (2 mcg) are incubated with fresh mouse, rat and/or human serum (2 mL) at 37° C. for 0, 1, 2, 4, 8, and 24 hours. To determine the level of intact compound, the following procedure can be used: The samples are extracted by transferring 100 L of sera to 2 mL centrifuge tubes followed by the addition of 10 μL of 50% formic acid and 500 μL acetonitrile and centrifugation at 14,000 RPM for 10 min at 4+2° C. The supernatants are then transferred to fresh 2 mL tubes and evaporated on Turbovap under N₂<10 psi, 37° C. The samples are reconstituted in 100 μL of 50:50 acetonitrile:water and submitted to LC-MS/MS analysis.

e. In Vitro Binding Assays

[0502] To assess the binding and affinity of peptidomimetic macrocycles and peptidomimetic precursors to acceptor proteins, a fluorescence polarization assay (FPA) is used, for example. The FPA technique measures the molecular orientation and mobility using polarized light and fluorescent tracer. When excited with polarized light, fluorescent tracers (e.g., FITC) attached to molecules with high apparent molecular weights (e.g. FITC-labeled peptides bound to a large protein) emit higher levels of polarized fluorescence due to slower rates of rotation as compared to fluorescent tracers attached to smaller molecules (e.g. FITC-labeled peptides that are free in solution). For example, fluoresceinated peptidomimetic macrocycles (25 nM) are incubated with the acceptor protein (25-1000 nM) in binding buffer (140 mM NaCl, 50 mM Tris-HCL, pH 7.4) for 30 minutes at room temperature. Binding activity is measured, for example, by fluorescence polarization on a luminescence spectrophotometer. K_{d} values can be determined by nonlinear regression analysis using, for example, GraphPad Prism software. A peptidomimetic macrocycle shows, in some embodiments, similar or lower K_{d} than a corresponding uncrosslinked polypeptide.

f. In Vitro Displacement Assays to Characterize Antagonists of Peptide-Protein Interactions

[0503] To assess the binding and affinity of compounds that antagonize the interaction between a peptide and an acceptor protein, a fluorescence polarization assay (FPA) utilizing a fluoresceinated peptidomimetic macrocycle derived from a peptidomimetic precursor sequence is used, for example. The FPA technique measures the molecular orientation and mobility using polarized light and fluorescent tracer. When excited with polarized light, fluorescent tracers (e.g., FITC) attached to molecules with high apparent molecular weights (e.g. FITC-labeled peptides bound to a large protein) emit higher levels of polarized fluorescence due to slower rates of rotation as compared to fluorescent tracers attached to smaller molecules (e.g. FITC-labeled peptides that are free in solution). A compound that antagonizes the interaction between the fluoresceinated peptidomimetic macrocycle and an acceptor protein is detected in a competitive binding FPA experiment.

[0504] For example, putative antagonist compounds (1 nM to 1 mM) and a fluoresceinated peptidomimetic macrocycle (25 nM) are incubated with the acceptor protein (50 nM) in binding buffer (140 mM NaCl, 50 mM Tris-HCL, pH 7.4) for 30 minutes at room temperature. Antagonist binding activity is measured, for example, by fluorescence polarization on a luminescence spectrophotometer. K_{d} values can be determined by nonlinear regression analysis. Any class of molecule, such as small organic molecules, peptides, oligonucleotides or proteins can be examined as putative antagonists in this assay.

g. Assay for Protein-Ligand Binding by Affinity Selection-Mass Spectrometry

[0505] To assess the binding and affinity of test compounds for proteins, an affinity-selection mass spectrometry assay is used, for example. Protein-ligand binding experiments are conducted according to the following representative procedure outlined for a system-wide control experiment using 1 μM peptidomimetic macrocycle plus 5 μM hMDM2. A 1 μL DMSO aliquot of a 40 μM stock solution of peptidomimetic macrocycle is dissolved in 19 μL of PBS (50 mM, pH 7.5 Phosphate buffer containing 150 mM NaCl). The resulting solution is mixed by repeated pipetting and clarified by centrifugation at 10,000 g for 10 min. To a 4 μL aliquot of the resulting supernatant is added 4 μL of 10 μM hMDM2 in PBS. Each 8.0 μL experimental sample thus contains 40 pmol (1.5 μg) of protein at 5.0 μM concentration in PBS plus 1 μM peptidomimetic macrocycle and 2.5% DMSO. Duplicate samples thus prepared for each concentration point are incubated for 60 min at room temperature, and then chilled to 4° C. prior to size-exclusion chromatography-LC-MS analysis of 5.0 μL injections. Samples containing a target protein, protein-ligand complexes, and unbound compounds are injected onto an SEC column, where the complexes are separated from non-binding component by a rapid SEC step. The SEC column eluate is monitored using UV detectors to confirm that the early-eluting protein fraction, which elutes in the void volume of the SEC column, is well resolved from unbound components that are retained on the column. After the fraction containing the protein and protein-ligand complexes elute from the primary UV detector, the fraction enters a sample loop where the fraction is excised from the flow stream of the SEC stage and transferred directly to the LC-MS via a valving mechanism. The (M+3H)³⁺ ion of the peptidomimetic macrocycle is observed by ESI-MS at the expected m/z, confirming the detection of the protein-ligand complex.

h. Assay for Protein-Ligand K_{d} Titration Experiments

[0506] To assess the binding and affinity of test compounds for proteins, a protein-ligand K_{d} titration experiment is performed, for example. Protein-ligand K_{d} titrations experiments are conducted as follows: 2 μL DMSO aliquots of a serially diluted stock solution of titrant peptidomimetic macrocycle (5, 2.5, . . . , 0.098 mM) are prepared then dissolved in 38 μL of PBS. The resulting solutions are mixed by repeated pipetting and clarified by centrifugation at 10 000 g for 10 min. To 4.0 μL aliquots of the resulting supernatants is added 4.0 μL of 10 μM hMDM2 in PBS. Each 8.0 μL experimental sample thus contains 40 pmol (1.5 μg) of protein at 5.0 μM concentration in PBS, varying concentrations (125, 62.5, . . . , 0.24 μM) of the titrant peptide, and 2.5% DMSO. Duplicate samples thus prepared for each concentration point are incubated at room temperature for 30 min, then chilled to 4° C. prior to SEC-LC-MS analysis of 2.0 μL injections. The (M+H)¹⁺, (M+2H)²⁺, (M+3H)³⁺, and/or (M+Na)¹⁺ ion is observed by ESI-MS; extracted ion chromatograms are quantified, then fit to equations to derive the binding affinity K_{d}.

i. Assay for Competitive Binding Experiments by Affinity Selection-Mass Spectrometry

[0507] To determine the ability of test compounds to bind competitively to proteins, an affinity selection mass spectrometry assay is performed, for example. A mixture of ligands at 40 μM per component is prepared by combining 2 μL aliquots of 400 μM stocks of each of the three compounds with 14 μL of DMSO. Then, 1 μL aliquots of this 40 μM per component mixture are combined with 1 μL DMSO aliquots of a serially diluted stock solution of titrant peptidomimetic macrocycle (10, 5, 2.5, . . . , 0.078 mM). These 2 μL samples are dissolved in 38 μL of PBS. The resulting solutions are mixed by repeated pipetting and clarified by centrifugation at 10,000 g for 10 min. To 4.0 μL aliquots of the resulting supernatants is added 4.0 μL of 10 μM hMDM2 protein in PBS. Each 8.0 μL experimental sample thus contains 40 pmol (1.5 μg) of protein at 5.0 μM concentration in PBS plus 0.5 μM ligand, 2.5% DMSO, and varying concentrations (125, 62.5, . . . , 0.98 μM) of the titrant peptidomimetic macrocycle. Duplicate samples thus prepared for each concentration point are incubated at room temperature for 60 min, then chilled to 4° C. prior to SEC-LC-MS analysis of 2.0 μL injections.

j. Binding Assays in Intact Cells

[0508] Binding of peptides or peptidomimetic macrocycles to their natural acceptors in intact cells by can be measured immunoprecipitation experiments. For example, intact cells are incubated with fluoresceinated (FITC-labeled) compounds for 4 hrs in the absence of serum, followed by serum replacement and further incubation that ranges from 4-18 hrs. Cells are then pelleted and incubated in lysis buffer (50 mM Tris [pH 7.6], 150 mM NaCl, 1% CHAPS and protease inhibitor cocktail) for 10 minutes at 4° C. Extracts are spun by centrifuge at 14,000 rpm for 15 minutes, and supernatants collected and incubated with 10 μL goat anti-FITC antibody for 2 hrs, rotating at 4° C. followed by further 2 hrs incubation at 4° C. with protein A/G Sepharose (50 L of 50% bead slurry). After quick centrifugation, the pellets are washed in lysis buffer containing increasing salt concentration (e.g., 150, 300, 500 mM). The beads are then re-equilibrated at 150 mM NaCl before addition of SDS-containing sample buffer and boiling. After centrifugation, the supernatants are optionally electrophoresed using 4%-12% gradient Bis-Tris gels followed by transfer into Immobilon-P membranes. After blocking, blots are optionally incubated with an antibody that detects FITC and also with one or more antibodies that detect proteins that bind to the peptidomimetic macrocycle.

k. Cellular Penetrability Assays

[0509] A peptidomimetic macrocycle can be, for example, more cell penetrable compared to a corresponding uncrosslinked macrocycle. Peptidomimetic macrocycles with optimized linkers can possess, for example, cell penetrability that is at least two-fold greater than that of a corresponding uncrosslinked macrocycle. Often 20% or more of the applied peptidomimetic macrocycle can be observed to have penetrated the cell after 4 hours. To measure the cell penetrability of peptidomimetic macrocycles and corresponding uncrosslinked macrocycle, intact cells are incubated with fluorescently-labeled (e.g. fluoresceinated) peptidomimetic macrocycles or corresponding uncrosslinked macrocycle (10 μM) for 4 hrs in serum free media at 37° C., washed twice with media and incubated with trypsin (0.25%) for 10 min at 37° C. The cells are washed again and resuspended in PBS. Cellular fluorescence is analyzed.

l. Cellular Efficacy Assays

[0510] The efficacy of certain peptidomimetic macrocycles is determined, for example, in cell-based killing assays using a variety of tumorigenic and non-tumorigenic cell lines and primary cells derived from human or mouse cell populations. Cell viability is monitored, for example, over 24-96 hrs of incubation with peptidomimetic macrocycles (0.5 to 50 μM) to identify those that kill at EC₅₀<10 μM. Several standard assays that measure cell viability are commercially available and are optionally used to assess the efficacy of the peptidomimetic macrocycles. Assays that measure Annexin V and caspase activation are optionally used to assess whether the peptidomimetic macrocycles kill cells by activating the apoptotic machinery. For example, the Cell Titer-glo assay is used which determines cell viability as a function of intracellular ATP concentration.

m. In Vivo Stability Assay

[0511] To investigate the in vivo stability of the peptidomimetic macrocycles, the compounds are, for example, administered to mice and/or rats by IV, IP, PO or inhalation routes at concentrations ranging from 0.1 to 50 mg/kg and blood specimens withdrawn at 0′, 5′, 15′, 30′, 1 hr, 4 hrs, 8 hrs and 24 hours post-injection. Levels of intact compound in 25 μL of fresh serum are then measured by LC-MS/MS as above.

n. In Vivo Efficacy in Animal Models

[0512] To determine the anti-oncogenic activity of peptidomimetic macrocycles in vivo, the compounds are, for example, given alone (IP, IV, PO, by inhalation or nasal routes) or in combination with sub-optimal doses of relevant chemotherapy (e.g., cyclophosphamide, doxorubicin, etoposide). In one example, 5×10⁶ RS4;11 cells (established from the bone marrow of a patient with acute lymphoblastic leukemia) that stably express luciferase are injected by tail vein in NOD-SCID mice 3 hrs after they have been subjected to total body irradiation. If left untreated, this form of leukemia is fatal in 3 weeks in this model. The leukemia is readily monitored, for example, by injecting the mice with D-luciferin (60 mg/kg) and imaging the anesthetized animals. Total body bioluminescence is quantified by integration of photonic flux (photons/sec) by Living Image Software. Peptidomimetic macrocycles alone or in combination with sub-optimal doses of relevant chemotherapeutics agents are, for example, administered to leukemic mice (10 days after injection/day 1 of experiment, in bioluminescence range of 14-16) by tail vein or IP routes at doses ranging from 0.1 mg/kg to 50 mg/kg for 7 to 21 days. Optionally, the mice are imaged throughout the experiment every other day and survival monitored daily for the duration of the experiment. Expired mice are optionally subjected to necropsy at the end of the experiment. Another animal model is implantation into NOD-SCID mice of DoHH2, a cell line derived from human follicular lymphoma that stably expresses luciferase. These in vivo tests optionally generate preliminary pharmacokinetic, pharmacodynamic and toxicology data.

o. In Vivo Gene Expression in Bone Marrow of Mice Treated with a Peptidomimetic Macrocycle

[0513] To assess the effects of a peptidomimetic macrocycle of the disclosure on gene expression in bone marrow, a controlled in vivo, preclinical study is performed. A therapeutically-effective amount (e.g. 2.4 mg/kg) of a peptidomimetic macrocycle of the disclosure is administered intravenously to a group of mice. mRNA is extracted from total bone marrow samples of mice at 0, 4, 8, 16, and 24 hours post macrocycle administration. Murine p21 (a downstream mediator of p53 dependent cell cycle arrest), Noxa (an apoptosis marker), and p53 upregulated modulator of apoptosis (PUMA) mRNA expression is assessed by real time polymerase chain reaction (PCR). In some embodiments, average p21 mRNA expression in the bone marrow of mice is increased about 7.5 fold to about 10 fold at about 4 hours after peptidomimetic macrocycle administration, and about five fold to about 7.5 fold at about 8 hours after peptidomimetic macrocycle administration, and returns to about baseline levels by about 16 hours post peptidomimetic macrocycle administration. In some embodiments, average PUMA mRNA expression is increased about 1 fold to about 3 fold at about 4 hours post peptidomimetic macrocycle administration and returns to about baseline levels at about 8 hours post peptidomimetic macrocycle administration. In some embodiments, average Noxa mRNA expression in bone marrow of the mice is unchanged following peptidomimetic macrocycle administration. In some embodiments, changes in average p21 mRNA expression, average PUMA mRNA expression, and/or average Noxa mRNA expression in bone marrow of the group of mice occur with at most a 10%, 20%, 30%, 40%, or 50% deviation from corresponding lines illustrated in FIG. 9.

p. Cell Cycle Arrest in Bone Marrow of a Preclinical Model

[0514] To assess the effects of a peptidomimetic macrocycle of the disclosure on cell cycle arrest in bone marrow a controlled, in vivo study is performed in mice. Mice are treated with 5 mg/kg, 10 mg/kg, or 20 mg/kg of a peptidomimetic macrocycle via intravenous administration. Cell cycle arrest in the bone marrow of mice is then measured by flow cytometry using 5-ethynyl-2′-deoxyuridine (EdU) incorporation in lineage negative, Kit positive, hematopoietic stem and progenitor cells at pre-treatment (0 hours post treatment), and 4 hours, 8 hours, 16 hours, and 24 hours post treatment. In some embodiments, the percentage of EdU+ cells is about 20% pre-treatment, less than about 5% at about 8 hours post treatment, between about 10% to about 25% at about 16 hours post treatment, and between about 40% to about 50% at about 24 hours post treatment. In some embodiments, a change in a percentage of lineage negative, Kit positive, hematopoietic stem and progenitor cells (HSPCs) that are EdU+ occurs with at most a 10%, 20%, 30%, 40%, or 50% deviation from corresponding lines illustrated in FIG. 11.

q. Effect of Peptidomimetic Macrocycle Administration on Topotecan-Induced Neutropenia

[0515] The effect of a peptidomimetic macrocycle of the disclosure on topotecan-induced neutropenia is assessed in a controlled, in vivo study. Four groups of mice are involved in the study, and administration of agents occurs over a 6-day treatment period. The first group of mice (Group 1) is treated with a vehicle control on days 2, 3, 4, 5, and 6 of the treatment period. The second group of mice (Group 2) is treated intravenously with 2.4 mg/kg of a peptidomimetic macrocycle on days 1, 2, 3, 4, and 5 of a 6-day treatment period. The third group of mice (Group 3) is treated with 1.5 mg/kg of topotecan on days 2, 3, 4, 5, and 6 of the 6-day treatment period. The fourth group of mice (Group 4) is treated with 2.4 mg/kg of the peptidomimetic macrocycle on days 1, 2, 3, 4, and 5 of the 6-day treatment period and 1.5 mg/kg of topotecan on days 2, 3, 4, 5, and 6 of the 6-day treatment period. Following the treatment period, complete blood counts are taken to determine the number of neutrophils present per μL of blood. In some embodiments, the mice of Group 4 have an average of about 588 neutrophils per μL of blood. In some embodiments, the number of neutrophils per μL of blood in mice of Group 4 ranges from about 200 to about 1000. In some embodiments, the mice of Group 3 have an average of about 320 neutrophils per μL of blood. In some embodiments, the number of neutrophils per μL of blood in mice of Group 3 ranges from about 10 to about 500. In some embodiments, the mice of Group 2 have a median number of neutrophils per μL of blood of about 1000. In some embodiments, the number of neutrophils per μL of blood in mice of Group 2 ranges from about 200 to about 1800. In some embodiments, the mice of Group 1 have a median number of neutrophils per μL of blood of about 600. In some embodiments, the number of neutrophils per μL of blood in mice of Group 1 ranges from about 450 to about 1000. In some embodiments an average number of neutrophils present per μL of blood in mice of Group 4 is increased by about 20%, 40%, 50%, 60%, 70%, 80%, 100%, 120%, or 140% compared to an average number of neutrophils present per μL of blood in mice of Group 3. In some embodiments, a number of neutrophils present per μL of blood in mice of Group 4 is increased compared to a number of neutrophils present per μL of blood in mice of Group 3 as illustrated in FIG. 16A or FIG. 16B.

r. Effect of Peptidomimetic Macrocycle Administration on Carboplatin and Paclitaxel-Induced Neutropenia

[0516] The effect of a peptidomimetic macrocycle of the disclosure on carboplatin and paclitaxel induced neutropenia is assessed in a controlled, in vivo study. Mice are divided into six treatment groups and administered vehicle control, a peptidomimetic macrocycle alone, a combination of carboplatin and paclitaxel, or a combination of a peptidomimetic macrocycle, carboplatin, and paclitaxel. The administration time(s) of the peptidomimetic macrocycle in relation to carboplatin and paclitaxel vary, with the time of carboplatin/paclitaxel administration being denoted as time 0 hours. Positive times (e.g. time +8 hours) indicate peptidomimetic macrocycle treatments that occur after treatment with carboplatin/paclitaxel and negative times (e.g., −1 hour) indicate peptidomimetic macrocycle treatment before carboplatin/paclitaxel administration. AP-1 and paclitaxel are administered intravenously, and carboplatin is administered via intraperitoneal injection.

[0517] Group 1 is treated with a vehicle control. Group 2 is treated with a peptidomimetic macrocycle (2.4 mg/kg) at times −8 hours, −1 hour and +8 hours. Group 3 is treated with carboplatin (25 mg/kg) and paclitaxel (5 mg/kg) at time 0 hour (C+P). Group 4 is treated with a peptidomimetic macrocycle at times −24 hours and −1 hour, and carboplatin (25 mg/kg) and paclitaxel (5 mg/kg) at time 0 hour. Group 5 is treated with a peptidomimetic macrocycle at times −8 hours, −1 hours and +8 hours, and carboplatin (25 mg/kg) and paclitaxel (5 mg/kg) at time 0 hour. Group 6 is treated with a peptidomimetic macrocycle at times −8 hours and −1 hour, and carboplatin (25 mg/kg) and paclitaxel (5 mg/kg) at time 0 hour. Following treatment, blood is collected from mice and neutrophil levels in blood are determined. In some embodiments, the mice of Group 6 have an average of about 225 neutrophils per μL of blood. In some embodiments, the number of neutrophils per μL of blood in mice of Group 6 ranges from about 100 to about 400. In some embodiments, the mice of Group 5 have an average of about 250 neutrophils per μL of blood. In some embodiments, the number of neutrophils per μL of blood in mice of Group 5 ranges from about 50 to about 350. In some embodiments, the mice of Group 4 have an average of about 150 neutrophils per μL of blood. In some embodiments, the number of neutrophils per μL of blood in mice of Group 4 ranges from about 100 to about 200. In some embodiments, the mice of Group 3 have an average of about 150 neutrophils per μL of blood. In some embodiments, the number of neutrophils per μL of blood in mice of Group 3 ranges from about 100 to about 225. In some embodiments, the mice of Group 2 have an average of about 225 neutrophils per μL of blood. In some embodiments, the number of neutrophils per μL of blood in mice of Group 2 ranges from about 150 to about 375. In some embodiments, the mice of Group 1 have an average of about 275 neutrophils per μL of blood. In some embodiments, the number of neutrophils per μL of blood in mice of Group 1 ranges from about 175 to about 475. In some embodiments, an average number of neutrophils present per μL of blood in mice of Group 5 is increased by about 20%, 40%, 50%, 60%, 70%, 80%, 100%, 120%, or 140% compared to an average number of neutrophils present per mL of blood in mice of Group 3. In some embodiments, a number of neutrophils present per μL of blood in mice of Group 5 is increased compared to a number of neutrophils present per μL of blood in mice of Group 3 as illustrated in FIG. 18A.

s. Effect of Peptidomimetic Macrocycle Administration on Topotecan-Induced Mucositis

[0518] The effect of a peptidomimetic macrocycle of the disclosure on topotecan-induced mucositis is assessed in a controlled, in vivo study. Four groups of mice (10 mice per group) are involved in the study, and administration of agents occurs over a 6-day treatment period. The first group of mice (Group 1) is treated with a vehicle control on days 2, 3, 4, 5, and 6 of the treatment period. The second group of mice (Group 2) is treated intravenously with 2.4 mg/kg of a peptidomimetic macrocycle on days 1, 2, 3, 4, and 5 of a 6-day treatment period. The third group of mice (Group 3) is treated with 1.5 mg/kg of topotecan on days 2, 3, 4, 5, and 6 of the 6-day treatment period. The fourth group of mice (Group 4) is treated with 2.4 mg/kg of the peptidomimetic macrocycle on days 1, 2, 3, 4, and 5 of the 6-day treatment period and 1.5 mg/kg of topotecan on days 2, 3, 4, 5, and 6 of the 6-day treatment period. Gut samples are then taken from mice on days 7 and 9 post treatment. Histopathology analysis of gut samples is performed to assess hypertrophy/hyperplasia. In some embodiments, all gut samples from mice in Groups 1 and 2 receive a hypertrophy/hyperplasia score of 0. In some embodiments gut samples from about 70% (e.g. 7/10) mice from Group 3 receive a hyperplasia/hypertrophy score of 3, and gut samples from about 30% (e.g. 3/10) mice receive a hypertrophy/hyperplasia score of 2. In some embodiments, gut samples from about 80% (e.g. 8/10) mice from Group 4 receive a hyperplasia/hypertrophy score of 2, and gut samples from about 20% (e.g. 2/10) mice receive a hypertrophy/hyperplasia score of 3. In some embodiments, a measure of hypertrophy/hyperplasia in digestive tract tissue in mice of Group 4 is improved compared to a measure of hypertrophy/hyperplasia in digestive tract tissue in mice Group 3 as illustrated in FIG. 24A.

t. Clinical Trials

[0519] To determine the suitability of combination treatment with a peptidomimetic macrocycle disclosed herein and an additional therapy (e.g. any additional therapeutic agent disclosed herein) in humans, clinical trials are performed. For example, patients diagnosed with cancer and in need of treatment can be selected and separated into combination treatment and one or more control groups, wherein the combination treatment group is administered a peptidomimetic macrocycle in combination with an additional therapeutic agent, while the control groups receive a placebo or the additional therapeutic agent alone. The treatment safety and efficacy of the combination treatment can thus be evaluated by performing comparisons of the patient groups with respect to factors such as the presence and severity of side effects, survival, and quality-of-life. In this example, the patient group treated with a combination of a peptidomimetic macrocycle and an additional therapeutic agent can show improved long-term survival and/or decreased side effects compared to patient control groups treated with a placebo or the additional therapeutic agent alone.

[0520] Overall health of a subject can also be assessed before or after treatment with a peptidomimetic macrocycle via Eastern Cooperative Oncology Group (ECOG) performance status (PS). The ECOG performance status assigns a 0-5 score to a subject based on the criteria shown in the table below:

| GRADE | ECOG PERFORMANCE STATUS |
|---|---|
| 0 | Fully active, able to carry on all pre-disease performance |
| | without restriction |
| 1 | Restricted in physically strenuous activity but ambulatory |
| | and able to carry out work of a light or sedentary nature, |
| | e.g., light house work, office work |
| 2 | Ambulatory and capable of all selfcare but unable to carry |
| | out any work activities; up and about more than 50% of |
| | waking hours |
| 3 | Capable of only limited selfcare; confined to bed or chair |
| | more than 50% of waking hours |
| 4 | Completely disabled; cannot carry on any selfcare; totally |
| | confined to bed or chair |
| 5 | Dead |

### EXAMPLES

### Example 1: Synthesis of 6-Chlorotryptophan Fmoc Amino Acids

[chemical structure]

### Tert-butyl 6-chloro-3-formyl-1H-indole-1-carboxylate, 1

[0522] To a stirred solution of dry DMF (12 mL) was added dropwise POCl₃ (3.92 mL, 43 mmol, 1.3 equiv) at 0° C. under argon. The solution was stirred at 0° C. for 20 min before a solution of 6-chloroindole (5.0 g, 33 mmol, 1 eq.) in dry DMF (30 mL) was added dropwise. The resulting mixture was warmed to room temperature and stirred for an additional 2.5 h. Water (50 mL) was added to the reaction mixture, and the solution was neutralized with 4M aqueous NaOH (pH ˜8). The resulting solid was filtered off, washed with water, and dried under vacuum. This material was used in the next step without additional purification.

[0523] To a stirred solution of the crude formyl indole (33 mmol, 1 eq.) in THF (150 mL) was added successively Boc₂O (7.91 g, 36.3 mmol, 1.1 equiv) and DMAP (0.4 g, 3.3 mmol, 0.1 equiv) at room temperature under N₂. The resulting mixture was stirred at room temperature for 1.5 h, and the solvent was evaporated under reduced pressure. The residue was taken up in EtOAc and washed with 1N HCl, dried, and concentrated to afford formyl indole 1 (9 g, 98% over 2 steps) as a white solid. ¹H NMR (CDCl₃) δ: 1.70 (s, Boc, 9H); 7.35 (dd, 1H); 8.21 (m, 3H); 10.07 (s, 1H).

### Tert-butyl 6-chloro-3-(hydroxymethyl)-1H-indole-1-carboxylate, 2

[0524] To a solution of compound 1 (8.86 g, 32 mmol, 1 eq.) in ethanol (150 mL) was added NaBH₄ (2.4 g, 63 mmol, 2 eq.). The reaction was stirred for 3 h at room temperature. The reaction mixture was concentrated, and the residue was poured into diethyl ether and water. The organic layer was separated, dried over magnesium sulfate, and concentrated to give a white solid (8.7 g, 98%). This material was directly used in the next step without additional purification. ¹H NMR (CDCl₃) δ: 1.65 (s, Boc, 9H); 4.80 (s, 2H, CH₂); 7.21 (dd, 1H); 7.53 (m, 2H); 8.16 (bs, 1H).

### αMe-6Cl-Trp(Boc)-Ni—S-BPB, 4

[0525] To S-Ala-Ni—S-BPB (2.66 g, 5.2 mmol, 1 eq.) and KO-tBu (0.87 g, 7.8 mmol, 1.5 eq.) was added 50 mL of DMF under argon. The bromide derivative compound 3 (2.68 g, 7.8 mmol, 1.5 eq.) was dissolved in DMF (5.0 mL) and added to the reaction mixture using a syringe. The reaction mixture was stirred at ambient temperature for 1 h. The solution was then quenched with 5% aqueous acetic acid and diluted with water. The desired product was extracted in dichloromethane, dried, and concentrated. The oily product 4 was purified by flash chromatography (solid loading) on normal phase using EtOAc and hexanes as eluents to give a red solid (1.78 g, 45% yield). M+H calc. 775.21, M+H obs. 775.26; ¹H NMR (CDCl₃) δ: 1.23 (s, 3H, cMe); 1.56 (m, 11H, Boc+CH₂); 1.82-2.20 (m, 4H, 2CH₂); 3.03 (m, 1H, CH_{α}); 3.24 (m, 2H, CH₂); 3.57 and 4.29 (AB system, 2H, CH₂ (benzyl), J=12.8 Hz); 6.62 (d, 2H); 6.98 (d, 1H); 7.14 (m, 2H); 7.23 (m, 1H); 7.32-7.36 (m, 5H); 7.50 (m, 2H); 7.67 (bs, 1H); 7.98 (d, 2H); 8.27 (m, 2H).

### 6Cl-Trp(Boc)-Ni—S-BPB, 5

[0526] To Gly-Ni—S-BPB (4.6 g, 9.2 mmol, 1 eq.) and KO-tBu (1.14 g, 10.1 mmol, 1.1 eq.) was added 95 mL of DMF under argon. The bromide derivative compound 3 (3.5 g, 4.6 mmol, 1.1 eq.) was dissolved in DMF (10 mL) and added to the reaction mixture using a syringe. The reaction mixture was stirred at ambient temperature for 1 h. The solution was then quenched with 5% aqueous acetic acid and diluted with water. The desired product was extracted in dichloromethane, dried and concentrated. The oily product 5 was purified by flash chromatography (solid loading) on normal phase using EtOAc and hexanes as eluents to give a red solid (5 g, 71% yield). M+H calc. 761.20, M+H obs. 761.34; ¹H NMR (CDCl₃) δ: 1.58 (m, 11H, Boc+CH₂); 1.84 (m, 1H); 1.96 (m, 1H); 2.24 (m, 2H, CH₂); 3.00 (m, 1H, CHa); 3.22 (m, 2H, CH₂); 3.45 and 4.25 (AB system, 2H, CH₂ (benzyl), J=12.8 Hz); 4.27 (m, 1H, CHa); 6.65 (d, 2H); 6.88 (d, 1H); 7.07 (m, 2H); 7.14 (m, 2H); 7.28 (m, 3H); 7.35-7.39 (m, 2H); 7.52 (m, 2H); 7.96 (d, 2H); 8.28 (m, 2H).

[0527] Fmoc-αMe-6Cl-Trp(Boc)-OH, 6.

[0528] To a solution of 3N HCl/MeOH (⅓, 15 mL) at 50° C. was added a solution of compound 4 (1.75 g, 2.3 mmol, 1 eq.) in MeOH (5 ml) dropwise. The starting material disappeared within 3-4 h. The acidic solution was then cooled to 0° C. with an ice bath and quenched with an aqueous solution of Na₂CO₃ (1.21 g, 11.5 mmol, 5 eq.). Methanol was removed and 8 eq. of Na₂CO₃ (1.95 g, 18.4 mmol) were added to the suspension. EDTA disodium salt dihydrate (1.68 g, 4.5 mmol, 2 eq.) was then added, and the resulting suspension was stirred for 2 h. A solution of Fmoc-OSu (0.84 g, 2.5 mmol, 1.1 eq.) in acetone (50 mL) was added, and the reaction was stirred overnight. The reaction was diluted with diethyl ether and 1N HCl. The organic layer was then dried over magnesium sulfate and concentrated in vacuo. The desired product 6 was purified on normal phase using acetone and dichloromethane as eluents to give a white foam (0.9 g, 70% yield). M+H calc. 575.19, M+H obs. 575.37; ¹H NMR (CDCl₃) 1.59 (s, 9H, Boc); 1.68 (s, 3H, Me); 3.48 (bs, 2H, CH₂); 4.22 (m, 1H, CH); 4.39 (bs, 2H, CH₂); 5.47 (s, 1H, NH); 7.10 (m, 1H); 7.18 (m, 2H); 7.27 (m, 2H); 7.39 (m, 2H); 7.50 (m, 2H); 7.75 (d, 2H); 8.12 (bs, 1H).

[0529] Fmoc-6Cl-Trp(Boc)-OH, 7.

[0530] To a solution of 3N HCl/MeOH (⅓, 44 mL) at 50° C. was added a solution of compound 5 (5 g, 6.6 mmol, 1 eq.) in MeOH (10 ml) dropwise. The starting material disappeared within 3-4 h. The acidic solution was then cooled to 0° C. with an ice bath and quenched with an aqueous solution of Na₂CO₃ (3.48 g, 33 mmol, 5 eq.). Methanol was removed and 8 eq. of Na₂CO₃ (5.57 g, 52 mmol) were added to the suspension. EDTA disodium salt dihydrate (4.89 g, 13.1 mmol, 2 eq.) was added to the suspension, and the resulting suspension was stirred for 2 h. A solution of Fmoc-OSu (2.21 g, 6.55 mmol, 1.1 eq.) in acetone (100 mL) was added, and the reaction was stirred overnight. The reaction was diluted with diethyl ether and 1N HCl. The organic layer was then dried over magnesium sulfate and concentrated in vacuo. The desired product 7 was purified on normal phase using acetone and dichloromethane as eluents to give a white foam (2.6 g, 69% yield). M+H calc. 561.17, M+H obs. 561.37; ¹H NMR (CDCl₃) 1.63 (s, 9H, Boc); 3.26 (m, 2H, CH₂); 4.19 (m, 1H, CH); 4.39 (m, 2H, CH₂); 4.76 (m, 1H); 5.35 (d, 1H, NH); 7.18 (m, 2H); 7.28 (m, 2H); 7.39 (m, 3H); 7.50 (m, 2H); 7.75 (d, 2H); 8.14 (bs, 1H).

### Example 2: Peptidomimetic Macrocycles

[0531] Peptidomimetic macrocycles were designed by replacing two or more naturally-occurring amino acids with the corresponding synthetic amino acids. Substitutions were made at i and i+4, and i and i+7 positions. Peptide synthesis was performed manually or using an automated peptide synthesizer under solid phase conditions using rink amide AM resin and Fmoc main-chain protecting group chemistry. For the coupling of natural Fmoc-protected amino acids, 10 eq. of amino acid and a 1:1:2 molar ratio of coupling reagents HBTU/HOBt/DIEA were employed. Non-natural amino acids (4 eq.) were coupled with a 1:1:2 molar ratio of HATU/HOBt/DIEA. The N-termini of the synthetic peptides were acetylated, and the C-termini were amidated.

[0532] Purification of crosslinked compounds was achieved by HPLC on a reverse phase C18 column to yield the pure compounds. The chemical compositions of the pure products were confirmed by LC/MS mass spectrometry and amino acid analysis.

[0533] Synthesis of Dialkyne-Crosslinked Peptidomimetic Macrocycles, Including SP662, SP663 and SP664.

[0534] Fully protected resin-bound peptides were synthesized on a PEG-PS resin (loading 0.45 mmol/g) on a 0.2 mmol scale. Deprotection of the temporary Fmoc group was achieved by 3×10 min treatments of the resin bound peptide with 20% (v/v) piperidine in DMF. After washing with NMP (3×), dichloromethane (3×) and NMP (3×), coupling of each successive amino acid was achieved with 1×60 min incubation with the appropriate pre-activated Fmoc-amino acid derivative. All protected amino acids (0.4 mmol) were dissolved in NMP and activated with HCTU (0.4 mmol) and DIEA (0.8 mmol) prior to transfer of the coupling solution to the de-protected resin-bound peptide. After coupling was completed, the resin was washed in preparation for the next deprotection/coupling cycle.

[0535] Acetylation of the amino terminus was carried out in the presence of acetic anhydride/DIEA in NMP. The LC-MS analysis of a cleaved and de-protected sample obtained from an aliquot of the fully assembled resin-bound peptide was accomplished in order to verifying the completion of each coupling. In a typical example, tetrahydrofuran (4 ml) and triethylamine (2 ml) were added to the peptide resin (0.2 mmol) in a 40 ml glass vial and shaken for 10 minutes. Pd(PPh₃)₂Cl₂ (0.014 g, 0.02 mmol) and copper iodide (0.008 g, 0.04 mmol) were then added and the resulting reaction mixture was mechanically shaken 16 hours while open to atmosphere. The diyne-cyclized resin-bound peptides were de-protected and cleaved from the solid support by treatment with TFA/H₂O/TIS (95/5/5 v/v) for 2.5 h at room temperature. After filtration of the resin the TFA solution was precipitated in cold diethyl ether and centrifuged to yield the desired product as a solid. The crude product was purified by preparative HPLC.

[0536] Synthesis of Single Alkyne-Crosslinked Peptidomimetic Macrocycles, Including SP665.

[0537] Fully protected resin-bound peptides were synthesized on a Rink amide MBHA resin (loading 0.62 mmol/g) on a 0.1 mmol scale. Deprotection of the temporary Fmoc group was achieved by 2×20 min treatments of the resin bound peptide with 25% (v/v) piperidine in NMP. After extensive flow washing with NMP and dichloromethane, coupling of each successive amino acid was achieved with 1×60 min incubation with the appropriate pre-activated Fmoc-amino acid derivative. All protected amino acids (1 mmol) were dissolved in NMP and activated with HCTU (1 mmol) and DIEA (1 mmol) prior to transfer of the coupling solution to the de-protected resin-bound peptide. After coupling was completed, the resin was extensively flow washed in preparation for the next deprotection/coupling cycle.

[0538] Acetylation of the amino terminus was carried out in the presence of acetic anhydride/DIEA in NMP/NMM. The LC-MS analysis of a cleaved and de-protected sample obtained from an aliquot of the fully assembled resin-bound peptide was accomplished to verify the completion of each coupling reaction. In a typical example, the peptide resin (0.1 mmol) was washed with DCM. Resin was loaded into a microwave vial. The vessel was evacuated and purged with nitrogen. Molybdenum hexacarbonyl (0.01 eq.) was added. Anhydrous chlorobenzene was added to the reaction vessel. Then 2-fluorophenol (1 eq.) was added. The reaction was then loaded into the microwave and held at 130° C. for 10 minutes. The reaction pushed for a longer period time when needed to complete the reaction. The alkyne-metathesized resin-bound peptides were de-protected and cleaved from the solid support by treating the solid support with TFA/H₂O/TIS (94/3/3 v/v) for 3 h at room temperature. After filtration of the resin, the TFA solution was precipitated in cold diethyl ether and centrifuged to yield the desired product as a solid. The crude product was purified by preparative HPLC.

[0539] TABLE 1 shows a list of peptidomimetic macrocycles prepared.

TABLE 1

| | | SEQ | | Exact | Found | Calc | Calc | Calc |
|---|---|---|---|---|---|---|---|---|
| SP | Sequence | ID NO: | Isomer | Mass | Mass | (M + 1)/1 | (M + 2)/2 | (M + 3)/3 |
| 1 | Ac-F$r8AYWEAc3cL$AAA-NH₂ | 1 | | 1456.78 | 729.44 | 1457.79 | 729.4 | 486.6 |
| 2 | Ac-F$r8AYWEAc3cL$AAibA-NH₂ | 2 | | 1470.79 | 736.4 | 1471.8 | 736.4 | 491.27 |
| 3 | Ac-LTF$r8AYWAQLSSANle-NH₂ | 3 | | 1715.97 | 859.02 | 1716.98 | 858.99 | 573 |
| 4 | Ac-LTF$r8AYWAQLSSAL-NH₂ | 4 | | 1715.97 | 859.02 | 1716.98 | 858.99 | 573 |
| 5 | Ac-LTF$r8AYWAQLSSAM-NH₂ | 5 | | 1733.92 | 868.48 | 1734.93 | 867.97 | 578.98 |
| 6 | Ac-LTF$r8AYWAQLSSAhL-NH₂ | 6 | | 1729.98 | 865.98 | 1730.99 | 866 | 577.67 |
| 7 | Ac-LTF$r8AYWAQLSSAF-NH₂ | 7 | | 1749.95 | 876.36 | 1750.96 | 875.98 | 584.32 |
| 8 | Ac-LTF$r8AYWAQL$SAI-NH₂ | 8 | | 1715.97 | 859.02 | 1716.98 | 858.99 | 573 |
| 9 | Ac-LTF$r8AYWAQL$SAChg-NH₂ | 9 | | 1741.98 | 871.98 | 1742.99 | 872 | 581.67 |
| 10 | Ac-LTF$r8AYWAQL$SAAib-NH₂ | 10 | | 1687.93 | 845.36 | 1688.94 | 844.97 | 563.65 |
| 11 | Ac-LTF$r8AYWAQL$SAA-NH₂ | 11 | | 1673.92 | 838.01 | 1674.93 | 837.97 | 558.98 |
| 12 | Ac-LTF$r8AYWA$L$S$Nle-NH₂ | 12 | | 1767.04 | 884.77 | 1768.05 | 884.53 | 590.02 |
| 13 | Ac-LTF$r8AYWA$L$S$A-NH₂ | 13 | | 1724.99 | 864.23 | 1726 | 863.5 | 576 |
| 14 | Ac-F$r8AYWEAc3cL$AANle-NH₂ | 14 | | 1498.82 | 750.46 | 1499.83 | 750.42 | 500.61 |
| 15 | Ac-F$r8AYWEAc3cL$AAL-NH₂ | 15 | | 1498.82 | 750.46 | 1499.83 | 750.42 | 500.61 |
| 16 | Ac-F$r8AYWEAc3cL$AAM-NH₂ | 16 | | 1516.78 | 759.41 | 1517.79 | 759.4 | 506.6 |
| 17 | Ac-F$r8AYWEAc3cL$AAhL-NH₂ | 17 | | 1512.84 | 757.49 | 1513.85 | 757.43 | 505.29 |
| 18 | Ac-F$r8AYWEAc3cL$AAF-NH₂ | 18 | | 1532.81 | 767.48 | 1533.82 | 767.41 | 511.94 |
| 19 | Ac-F$r8AYWEAc3cL$AAI-NH₂ | 19 | | 1498.82 | 750.39 | 1499.83 | 750.42 | 500.61 |
| 20 | Ac-F$r8AYWEAc3cL$AAChg-NH₂ | 20 | | 1524.84 | 763.48 | 1525.85 | 763.43 | 509.29 |
| 21 | Ac-F$r8AYWEAc3cL$AACha-NH₂ | 21 | | 1538.85 | 770.44 | 1539.86 | 770.43 | 513.96 |
| 22 | Ac-F$r8AYWEAc3cL$AAAib-NH₂ | 22 | | 1470.79 | 736.84 | 1471.8 | 736.4 | 491.27 |
| 23 | Ac-LTF$r8AYWAQL$AAAibV-NH₂ | 23 | | 1771.01 | 885.81 | 1772.02 | 886.51 | 591.34 |
| 24 | Ac-LTF$r8AYWAQL$AAAibV-NH₂ | 24 | iso2 | 1771.01 | 886.26 | 1772.02 | 886.51 | 591.34 |
| 25 | Ac-LTF$r8AYWAQL$SAibAA-NH₂ | 25 | | 1758.97 | 879.89 | 1759.98 | 880.49 | 587.33 |
| 26 | Ac-LTF$r8AYWAQL$SAibAA-NH₂ | 26 | iso2 | 1758.97 | 880.34 | 1759.98 | 880.49 | 587.33 |
| 27 | Ac-HLTF$r8HHWHQL$AANleNle-NH₂ | 27 | | 2056.15 | 1028.86 | 2057.16 | 1029.08 | 686.39 |
| 28 | Ac-DLTF$r8HHWHQL$RRLV-NH₂ | 28 | | 2190.23 | 731.15 | 2191.24 | 1096.12 | 731.08 |
| 29 | Ac-HHTF$r8HHWHQL$AAML-NH₂ | 29 | | 2098.08 | 700.43 | 2099.09 | 1050.05 | 700.37 |
| 30 | Ac-F$r8HHWHQL$RRDCha-NH₂ | 30 | | 1917.06 | 959.96 | 1918.07 | 959.54 | 640.03 |
| 31 | Ac-F$r8HHWHQL$HRFV-NH₂ | 31 | | 1876.02 | 938.65 | 1877.03 | 939.02 | 626.35 |
| 32 | Ac-HLTF$r8HHWHQL$AAhLA-NH₂ | 32 | | 2028.12 | 677.2 | 2029.13 | 1015.07 | 677.05 |
| 33 | Ac-DLTF$r8HHWHQL$RRChgl-NH₂ | 33 | | 2230.26 | 1115.89 | 2231.27 | 1116.14 | 744.43 |
| 34 | Ac-DLTF$r8HHWHQL$RRChgl-NH₂ | 34 | iso2 | 2230.26 | 1115.96 | 2231.27 | 1116.14 | 744.43 |
| 35 | Ac-HHTF$r8HHWHQL$AAChav-NH₂ | 35 | | 2106.14 | 1053.95 | 2107.15 | 1054.08 | 703.05 |
| 36 | Ac-F$r8HHWHQL$RRDa-NH₂ | 36 | | 1834.99 | 918.3 | 1836 | 918.5 | 612.67 |
| 37 | Ac-F$r8HHWHQL$HRAibG-NH₂ | 37 | | 1771.95 | 886.77 | 1772.96 | 886.98 | 591.66 |
| 38 | Ac-F$r8AYWAQL$HHNleL-NH₂ | 38 | | 1730.97 | 866.57 | 1731.98 | 866.49 | 578 |
| 39 | Ac-F$r8AYWSAL$HQANle-NH₂ | 39 | | 1638.89 | 820.54 | 1639.9 | 820.45 | 547.3 |
| 40 | Ac-F$r8AYWVQL$QHChgl-NH₂ | 40 | | 1776.01 | 889.44 | 1777.02 | 889.01 | 593.01 |
| 41 | Ac-F$r8AYWTAL$QQNlev-NH₂ | 41 | | 1671.94 | 836.97 | 1672.95 | 836.98 | 558.32 |
| 42 | Ac-F$r8AYWYQL$HAibAa-NH₂ | 42 | | 1686.89 | 844.52 | 1687.9 | 844.45 | 563.3 |
| 43 | Ac-LTF$r8AYWAQL$HHLa-NH₂ | 43 | | 1903.05 | 952.27 | 1904.06 | 952.53 | 635.36 |
| 44 | Ac-LTF$r8AYWAQL$HHLa-NH₂ | 44 | iso2 | 1903.05 | 952.27 | 1904.06 | 952.53 | 635.36 |
| 45 | Ac-LTF$r8AYWAQL$HQNlev-NH₂ | 45 | | 1922.08 | 962.48 | 1923.09 | 962.05 | 641.7 |
| 46 | Ac-LTF$r8AYWAQL$HQNlev-NH₂ | 46 | iso2 | 1922.08 | 962.4 | 1923.09 | 962.05 | 641.7 |
| 47 | Ac-LTF$r8AYWAQL$QQMl-NH₂ | 47 | | 1945.05 | 973.95 | 1946.06 | 973.53 | 649.36 |
| 48 | Ac-LTF$r8AYWAQL$QQMl-NH₂ | 48 | iso2 | 1945.05 | 973.88 | 1946.06 | 973.53 | 649.36 |
| 49 | Ac-LTF$r8AYWAQL$HAibhLV-NH₂ | 49 | | 1893.09 | 948.31 | 1894.1 | 947.55 | 632.04 |
| 50 | Ac-LTF$r8AYWAQL$AHFA-NH₂ | 50 | | 1871.01 | 937.4 | 1872.02 | 936.51 | 624.68 |
| 51 | Ac-HLTF$r8HHWHQL$AANlel-NH₂ | 51 | | 2056.15 | 1028.79 | 2057.16 | 1029.08 | 686.39 |
| 52 | Ac-DLTF$r8HHWHQL$RRLa-NH₂ | 52 | | 2162.2 | 721.82 | 2163.21 | 1082.11 | 721.74 |
| 53 | Ac-HHTF$r8HHWHQL$AAMv-NH₂ | 53 | | 2084.07 | 1042.92 | 2085.08 | 1043.04 | 695.7 |
| 54 | Ac-F$r8HHWHQL$RRDA-NH₂ | 54 | | 1834.99 | 612.74 | 1836 | 918.5 | 612.67 |
| 55 | Ac-F$r8HHWHQL$HRFCha-NH₂ | 55 | | 1930.06 | 966.47 | 1931.07 | 966.04 | 644.36 |
| 56 | Ac-F$r8AYWEAL$AA-NHAm | 56 | | 1443.82 | 1445.71 | 1444.83 | 722.92 | 482.28 |
| 57 | Ac-F$r8AYWEAL$AA-NHiAm | 57 | | 1443.82 | 723.13 | 1444.83 | 722.92 | 482.28 |
| 58 | Ac-F$r8AYWEAL$AA-NHnPr3Ph | 58 | | 1491.82 | 747.3 | 1492.83 | 746.92 | 498.28 |
| 59 | Ac-F$r8AYWEAL$AA-NHnBu33Me | 59 | | 1457.83 | 1458.94 | 1458.84 | 729.92 | 486.95 |
| 60 | Ac-F$r8AYWEAL$AA-NHnPr | 60 | | 1415.79 | 709.28 | 1416.8 | 708.9 | 472.94 |
| 61 | Ac-F$r8AYWEAL$AA-NHnEt2Ch | 61 | | 1483.85 | 1485.77 | 1484.86 | 742.93 | 495.62 |
| 62 | Ac-F$r8AYWEAL$AA-NHnEt2Cp | 62 | | 1469.83 | 1470.78 | 1470.84 | 735.92 | 490.95 |
| 63 | Ac-F$r8AYWEAL$AA-NHHex | 63 | | 1457.83 | 730.19 | 1458.84 | 729.92 | 486.95 |
| 64 | Ac-LTF$r8AYWAQL$AAIA-NH₂ | 64 | | 1771.01 | 885.81 | 1772.02 | 886.51 | 591.34 |
| 65 | Ac-LTF$r8AYWAQL$AAIA-NH₂ | 65 | iso2 | 1771.01 | 866.8 | 1772.02 | 886.51 | 591.34 |
| 66 | Ac-LTF$r8AYWAAL$AAMA-NH₂ | 66 | | 1731.94 | 867.08 | 1732.95 | 866.98 | 578.32 |
| 67 | Ac-LTF$r8AYWAAL$AAMA-NH₂ | 67 | iso2 | 1731.94 | 867.28 | 1732.95 | 866.98 | 578.32 |
| 68 | Ac-LTF$r8AYWAQL$AANleA-NH₂ | 68 | | 1771.01 | 867.1 | 1772.02 | 886.51 | 591.34 |
| 69 | Ac-LTF$r8AYWAQL$AANleA-NH₂ | 69 | iso2 | 1771.01 | 886.89 | 1772.02 | 886.51 | 591.34 |
| 70 | Ac-LTF$r8AYWAQL$AAIa-NH₂ | 70 | | 1771.01 | 886.8 | 1772.02 | 886.51 | 591.34 |
| 71 | Ac-LTF$r8AYWAQL$AAIa-NH₂ | 71 | iso2 | 1771.01 | 887.09 | 1772.02 | 886.51 | 591.34 |
| 72 | Ac-LTF$r8AYWAAL$AAMa-NH₂ | 72 | | 1731.94 | 867.17 | 1732.95 | 866.98 | 578.32 |
| 73 | Ac-LTF$r8AYWAAL$AAMa-NH₂ | 73 | iso2 | 1731.94 | 867.37 | 1732.95 | 866.98 | 578.32 |
| 74 | Ac-LTF$r8AYWAQL$AANlea-NH₂ | 74 | | 1771.01 | 887.08 | 1772.02 | 886.51 | 591.34 |
| 75 | Ac-LTF$r8AYWAQL$AANlea-NH₂ | 75 | iso2 | 1771.01 | 887.08 | 1772.02 | 886.51 | 591.34 |
| 76 | Ac-LTF$r8AYWAAL$AAIv-NH₂ | 76 | | 1742.02 | 872.37 | 1743.03 | 872.02 | 581.68 |
| 77 | Ac-LTF$r8AYWAAL$AAIv-NH₂ | 77 | iso2 | 1742.02 | 872.74 | 1743.03 | 872.02 | 581.68 |
| 78 | Ac-LTF$r8AYWAQL$AAMv-NH₂ | 78 | | 1817 | 910.02 | 1818.01 | 909.51 | 606.67 |
| 79 | Ac-LTF$r8AYWAAL$AANlev-NH₂ | 79 | | 1742.02 | 872.37 | 1743.03 | 872.02 | 581.68 |
| 80 | Ac-LTF$r8AYWAAL$AANlev-NH₂ | 80 | iso2 | 1742.02 | 872.28 | 1743.03 | 872.02 | 581.68 |
| 81 | Ac-LTF$r8AYWAQL$AAIl-NH₂ | 81 | | 1813.05 | 907.81 | 1814.06 | 907.53 | 605.36 |
| 82 | Ac-LTF$r8AYWAQL$AAIl-NH₂ | 82 | iso2 | 1813.05 | 907.81 | 1814.06 | 907.53 | 605.36 |
| 83 | Ac-LTF$r8AYWAAL$AAMl-NH₂ | 83 | | 1773.99 | 887.37 | 1775 | 888 | 592.34 |
| 84 | Ac-LTF$r8AYWAQL$AANlel-NH₂ | 84 | | 1813.05 | 907.61 | 1814.06 | 907.53 | 605.36 |
| 85 | Ac-LTF$r8AYWAQL$AANlel-NH₂ | 85 | iso2 | 1813.05 | 907.71 | 1814.06 | 907.53 | 605.36 |
| 86 | Ac-F$r8AYWEAL$AAMA-NH₂ | 86 | | 1575.82 | 789.02 | 1576.83 | 788.92 | 526.28 |
| 87 | Ac-F$r8AYWEAL$AANleA-NH₂ | 87 | | 1557.86 | 780.14 | 1558.87 | 779.94 | 520.29 |
| 88 | Ac-F$r8AYWEAL$AAIa-NH₂ | 88 | | 1557.86 | 780.33 | 1558.87 | 779.94 | 520.29 |
| 89 | Ac-F$r8AYWEAL$AAMa-NH₂ | 89 | | 1575.82 | 789.3 | 1576.83 | 788.92 | 526.28 |
| 90 | Ac-F$r8AYWEAL$AANlea-NH₂ | 90 | | 1557.86 | 779.4 | 1558.87 | 779.94 | 520.29 |
| 91 | Ac-F$r8AYWEAL$AAIv-NH₂ | 91 | | 1585.89 | 794.29 | 1586.9 | 793.95 | 529.64 |
| 92 | Ac-F$r8AYWEAL$AAMv-NH₂ | 92 | | 1603.85 | 803.08 | 1604.86 | 802.93 | 535.62 |
| 93 | Ac-F$r8AYWEAL$AANlev-NH₂ | 93 | | 1585.89 | 793.46 | 1586.9 | 793.95 | 529.64 |
| 94 | Ac-F$r8AYWEAL$AAIl-NH₂ | 94 | | 1599.91 | 800.49 | 1600.92 | 800.96 | 534.31 |
| 95 | Ac-F$r8AYWEAL$AAMl-NH₂ | 95 | | 1617.86 | 809.44 | 1618.87 | 809.94 | 540.29 |
| 96 | Ac-F$r8AYWEAL$AANlel-NH₂ | 96 | | 1599.91 | 801.7 | 1600.92 | 800.96 | 534.31 |
| 97 | Ac-F$r8AYWEAL$AANlel-NH₂ | 97 | iso2 | 1599.91 | 801.42 | 1600.92 | 800.96 | 534.31 |
| 98 | Ac-LTF$r8AY6clWAQL$SAA-NH₂ | 98 | | 1707.88 | 855.72 | 1708.89 | 854.95 | 570.3 |
| 99 | Ac-LTF$r8AY6clWAQL$SAA-NH₂ | 99 | iso2 | 1707.88 | 855.35 | 1708.89 | 854.95 | 570.3 |
| 100 | Ac-WTF$r8FYWSQL$AVAa-NH₂ | 100 | | 1922.01 | 962.21 | 1923.02 | 962.01 | 641.68 |
| 101 | Ac-WTF$r8FYWSQL$AVAa-NH₂ | 101 | iso2 | 1922.01 | 962.49 | 1923.02 | 962.01 | 641.68 |
| 102 | Ac-WTF$r8VYWSQL$AVA-NH₂ | 102 | | 1802.98 | 902.72 | 1803.99 | 902.5 | 602 |
| 103 | Ac-WTF$r8VYWSQL$AVA-NH₂ | 103 | iso2 | 1802.98 | 903 | 1803.99 | 902.5 | 602 |
| 104 | Ac-WTF$r8FYWSQL$SAAa-NH₂ | 104 | | 1909.98 | 956.47 | 1910.99 | 956 | 637.67 |
| 105 | Ac-WTF$r8FYWSQL$SAAa-NH₂ | 105 | iso2 | 1909.98 | 956.47 | 1910.99 | 956 | 637.67 |
| 106 | Ac-WTF$r8VYWSQL$AVAaa-NH₂ | 106 | | 1945.05 | 974.15 | 1946.06 | 973.53 | 649.36 |
| 107 | Ac-WTF$r8VYWSQL$AVAaa-NH₂ | 107 | iso2 | 1945.05 | 973.78 | 1946.06 | 973.53 | 649.36 |
| 108 | Ac-LTF$r8AYWAQL$AVG-NH₂ | 108 | | 1671.94 | 837.52 | 1672.95 | 836.98 | 558.32 |
| 109 | Ac-LTF$r8AYWAQL$AVG-NH₂ | 109 | iso2 | 1671.94 | 837.21 | 1672.95 | 836.98 | 558.32 |
| 110 | Ac-LTF$r8AYWAQL$AVQ-NH₂ | 110 | | 1742.98 | 872.74 | 1743.99 | 872.5 | 582 |
| 111 | Ac-LTF$r8AYWAQL$AVQ-NH₂ | 111 | iso2 | 1742.98 | 872.74 | 1743.99 | 872.5 | 582 |
| 112 | Ac-LTF$r8AYWAQLSSAa-NH₂ | 112 | | 1673.92 | 838.23 | 1674.93 | 837.97 | 558.98 |
| 113 | Ac-LTF$r8AYWAQLSSAa-NH₂ | 113 | iso2 | 1673.92 | 838.32 | 1674.93 | 837.97 | 558.98 |
| 114 | Ac-LTF$r8AYWAQhL$SAA-NH₂ | 114 | | 1687.93 | 844.37 | 1688.94 | 844.97 | 563.65 |
| 115 | Ac-LTF$r8AYWAQhL$SAA-NH₂ | 115 | iso2 | 1687.93 | 844.81 | 1688.94 | 844.97 | 563.65 |
| 116 | Ac-LTF$r8AYWEQLStSA$-NH₂ | 116 | | 1826 | 905.27 | 1827.01 | 914.01 | 609.67 |
| 117 | Ac-LTF$r8AYWAQLSSLA-NH₂ | 117 | | 1715.97 | 858.48 | 1716.98 | 858.99 | 573 |
| 118 | Ac-LTF$r8AYWAQLSSLA-NH₂ | 118 | iso2 | 1715.97 | 858.87 | 1716.98 | 858.99 | 573 |
| 119 | Ac-LTF$r8AYWAQLSSWA-NH₂ | 119 | | 1788.96 | 895.21 | 1789.97 | 895.49 | 597.33 |
| 120 | Ac-LTF$r8AYWAQLSSWA-NH₂ | 120 | iso2 | 1788.96 | 895.28 | 1789.97 | 895.49 | 597.33 |
| 121 | Ac-LTF$r8AYWAQL$SVS-NH₂ | 121 | | 1717.94 | 859.84 | 1718.95 | 859.98 | 573.65 |
| 122 | Ac-LTF$r8AYWAQLSSAS-NH₂ | 122 | | 1689.91 | 845.85 | 1690.92 | 845.96 | 564.31 |
| 123 | Ac-LTF$r8AYWAQLSSVG-NH₂ | 123 | | 1687.93 | 844.81 | 1688.94 | 844.97 | 563.65 |
| 124 | Ac-ETF$r8VYWAQL$SAa-NH₂ | 124 | | 1717.91 | 859.76 | 1718.92 | 859.96 | 573.64 |
| 125 | Ac-ETF$r8VYWAQL$SAA-NH₂ | 125 | | 1717.91 | 859.84 | 1718.92 | 859.96 | 573.64 |
| 126 | Ac-ETF$r8VYWAQL$SVA-NH₂ | 126 | | 1745.94 | 873.82 | 1746.95 | 873.98 | 582.99 |
| 127 | Ac-ETF$r8VYWAQL$SLA-NH₂ | 127 | | 1759.96 | 880.85 | 1760.97 | 880.99 | 587.66 |
| 128 | Ac-ETF$r8VYWAQL$SWA-NH₂ | 128 | | 1832.95 | 917.34 | 1833.96 | 917.48 | 611.99 |
| 129 | Ac-ETF$r8KYWAQL$SWA-NH₂ | 129 | | 1861.98 | 931.92 | 1862.99 | 932 | 621.67 |
| 130 | Ac-ETF$r8VYWAQL$SVS-NH₂ | 130 | | 1761.93 | 881.89 | 1762.94 | 881.97 | 588.32 |
| 131 | Ac-ETF$r8VYWAQL$SAS-NH₂ | 131 | | 1733.9 | 867.83 | 1734.91 | 867.96 | 578.97 |
| 132 | Ac-ETF$r8VYWAQL$SVG-NH₂ | 132 | | 1731.92 | 866.87 | 1732.93 | 866.97 | 578.31 |
| 133 | Ac-LTF$r8VYWAQL$SSa-NH₂ | 133 | | 1717.94 | 859.47 | 1718.95 | 859.98 | 573.65 |
| 134 | Ac-ETF$r8VYWAQL$SSa-NH₂ | 134 | | 1733.9 | 867.83 | 1734.91 | 867.96 | 578.97 |
| 135 | Ac-LTF$r8VYWAQL$SNa-NH₂ | 135 | | 1744.96 | 873.38 | 1745.97 | 873.49 | 582.66 |
| 136 | Ac-ETF$r8VYWAQL$SNa-NH₂ | 136 | | 1760.91 | 881.3 | 1761.92 | 881.46 | 587.98 |
| 137 | Ac-LTF$r8VYWAQL$SAa-NH₂ | 137 | | 1701.95 | 851.84 | 1702.96 | 851.98 | 568.32 |
| 138 | Ac-LTF$r8VYWAQL$SVA-NH₂ | 138 | | 1729.98 | 865.53 | 1730.99 | 866 | 577.67 |
| 139 | Ac-LTF$r8VYWAQL$SVA-NH₂ | 139 | iso2 | 1729.98 | 865.9 | 1730.99 | 866 | 577.67 |
| 140 | Ac-LTF$r8VYWAQL$SWA-NH₂ | 140 | | 1816.99 | 909.42 | 1818 | 909.5 | 606.67 |
| 141 | Ac-LTF$r8VYWAQL$SVS-NH₂ | 141 | | 1745.98 | 873.9 | 1746.99 | 874 | 583 |
| 142 | Ac-LTF$r8VYWAQL$SVS-NH₂ | 142 | iso2 | 1745.98 | 873.9 | 1746.99 | 874 | 583 |
| 143 | Ac-LTF$r8VYWAQL$SAS-NH₂ | 143 | | 1717.94 | 859.84 | 1718.95 | 859.98 | 573.65 |
| 144 | Ac-LTF$r8VYWAQL$SAS-NH₂ | 144 | iso2 | 1717.94 | 859.91 | 1718.95 | 859.98 | 573.65 |
| 145 | Ac-LTF$r8VYWAQL$SVG-NH₂ | 145 | | 1715.97 | 858.87 | 1716.98 | 858.99 | 573 |
| 146 | Ac-LTF$r8VYWAQL$SVG-NH₂ | 146 | iso2 | 1715.97 | 858.87 | 1716.98 | 858.99 | 573 |
| 147 | Ac-LTF$r8EYWAQCha$SAA-NH₂ | 147 | | 1771.96 | 886.85 | 1772.97 | 886.99 | 591.66 |
| 148 | Ac-LTF$r8EYWAQCha$SAA-NH₂ | 148 | iso2 | 1771.96 | 886.85 | 1772.97 | 886.99 | 591.66 |
| 149 | Ac-LTF$r8EYWAQCpg$SAA-NH₂ | 149 | | 1743.92 | 872.86 | 1744.93 | 872.97 | 582.31 |
| 150 | Ac-LTF$r8EYWAQCpg$SAA-NH₂ | 150 | iso2 | 1743.92 | 872.86 | 1744.93 | 872.97 | 582.31 |
| 151 | Ac-LTF$r8EYWAQF$SAA-NH₂ | 151 | | 1765.91 | 883.44 | 1766.92 | 883.96 | 589.64 |
| 152 | Ac-LTF$r8EYWAQF$SAA-NH₂ | 152 | iso2 | 1765.91 | 883.89 | 1766.92 | 883.96 | 589.64 |
| 153 | Ac-LTF$r8EYWAQCba$SAA-NH₂ | 153 | | 1743.92 | 872.42 | 1744.93 | 872.97 | 582.31 |
| 154 | Ac-LTF$r8EYWAQCba$SAA-NH₂ | 154 | iso2 | 1743.92 | 873.39 | 1744.93 | 872.97 | 582.31 |
| 155 | Ac-LTF3Cl$r8EYWAQL$SAA-NH₂ | 155 | | 1765.89 | 883.89 | 1766.9 | 883.95 | 589.64 |
| 156 | Ac-LTF3Cl$r8EYWAQL$SAA-NH₂ | 156 | iso2 | 1765.89 | 883.96 | 1766.9 | 883.95 | 589.64 |
| 157 | Ac-LTF34F2$r8EYWAQL$SAA-NH₂ | 157 | | 1767.91 | 884.48 | 1768.92 | 884.96 | 590.31 |
| 158 | Ac-LTF34F2$r8EYWAQL$SAA-NH₂ | 158 | iso2 | 1767.91 | 884.48 | 1768.92 | 884.96 | 590.31 |
| 159 | Ac-LTF34F2$r8EYWAQhL$SAA-NH₂ | 159 | | 1781.92 | 891.44 | 1782.93 | 891.97 | 594.98 |
| 160 | Ac-LTF34F2$r8EYWAQhL$SAA-NH₂ | 160 | iso2 | 1781.92 | 891.88 | 1782.93 | 891.97 | 594.98 |
| 161 | Ac-ETF$r8EYWAQL$SAA-NH₂ | 161 | | 1747.88 | 874.34 | 1748.89 | 874.95 | 583.63 |
| 162 | Ac-LTF$r8AYWVQL$SAA-NH₂ | 162 | | 1701.95 | 851.4 | 1702.96 | 851.98 | 568.32 |
| 163 | Ac-LTF$r8AHWAQL$SAA-NH₂ | 163 | | 1647.91 | 824.83 | 1648.92 | 824.96 | 550.31 |
| 164 | Ac-LTF$r8AEWAQL$SAA-NH₂ | 164 | | 1639.9 | 820.39 | 1640.91 | 820.96 | 547.64 |
| 165 | Ac-LTF$r8ASWAQL$SAA-NH₂ | 165 | | 1597.89 | 799.38 | 1598.9 | 799.95 | 533.64 |
| 166 | Ac-LTF$r8AEWAQL$SAA-NH₂ | 166 | iso2 | 1639.9 | 820.39 | 1640.91 | 820.96 | 547.64 |
| 167 | Ac-LTF$r8ASWAQL$SAA-NH₂ | 167 | iso2 | 1597.89 | 800.31 | 1598.9 | 799.95 | 533.64 |
| 168 | Ac-LTF$r8AF4coohWAQL$SAA-NH₂ | 168 | | 1701.91 | 851.4 | 1702.92 | 851.96 | 568.31 |
| 169 | Ac-LTF$r8AF4coohWAQL$SAA-NH₂ | 169 | iso2 | 1701.91 | 851.4 | 1702.92 | 851.96 | 568.31 |
| 170 | Ac-LTF$r8AHWAQL$AAIa-NH₂ | 170 | | 1745 | 874.13 | 1746.01 | 873.51 | 582.67 |
| 171 | Ac-ITF$r8FYWAQL$AAIa-NH₂ | 171 | | 1847.04 | 923.92 | 1848.05 | 924.53 | 616.69 |
| 172 | Ac-ITF$r8EHWAQL$AAIa-NH₂ | 172 | | 1803.01 | 903.17 | 1804.02 | 902.51 | 602.01 |
| 173 | Ac-ITF$r8EHWAQL$AAIa-NH₂ | 173 | iso2 | 1803.01 | 903.17 | 1804.02 | 902.51 | 602.01 |
| 174 | Ac-ETF$r8EHWAQL$AAIa-NH₂ | 174 | | 1818.97 | 910.76 | 1819.98 | 910.49 | 607.33 |
| 175 | Ac-ETF$r8EHWAQL$AAIa-NH₂ | 175 | iso2 | 1818.97 | 910.85 | 1819.98 | 910.49 | 607.33 |
| 176 | Ac-LTF$r8AHWVQL$AAIa-NH₂ | 176 | | 1773.03 | 888.09 | 1774.04 | 887.52 | 592.02 |
| 177 | Ac-ITF$r8FYWVQL$AAIa-NH₂ | 177 | | 1875.07 | 939.16 | 1876.08 | 938.54 | 626.03 |
| 178 | Ac-ITF$r8EYWVQL$AAIa-NH₂ | 178 | | 1857.04 | 929.83 | 1858.05 | 929.53 | 620.02 |
| 179 | Ac-ITF$r8EHWVQL$AAIa-NH₂ | 179 | | 1831.04 | 916.86 | 1832.05 | 916.53 | 611.35 |
| 180 | Ac-LTF$r8AEWAQL$AAIa-NH₂ | 180 | | 1736.99 | 869.87 | 1738 | 869.5 | 580 |
| 181 | Ac-LTF$r8AF4coohWAQL$AAIa-NH₂ | 181 | | 1799 | 900.17 | 1800.01 | 900.51 | 600.67 |
| 182 | Ac-LTF$r8AF4coohWAQL$AAIa-NH₂ | 182 | iso2 | 1799 | 900.24 | 1800.01 | 900.51 | 600.67 |
| 183 | Ac-LTF$r8AHWAQL$AHFA-NH₂ | 183 | | 1845.01 | 923.89 | 1846.02 | 923.51 | 616.01 |
| 184 | Ac-ITF$r8FYWAQL$AHFA-NH₂ | 184 | | 1947.05 | 975.05 | 1948.06 | 974.53 | 650.02 |
| 185 | Ac-ITF$r8FYWAQL$AHFA-NH₂ | 185 | iso2 | 1947.05 | 976.07 | 1948.06 | 974.53 | 650.02 |
| 186 | Ac-ITF$r8FHWAQL$AEFA-NH₂ | 186 | | 1913.02 | 958.12 | 1914.03 | 957.52 | 638.68 |
| 187 | Ac-ITF$r8FHWAQL$AEFA-NH₂ | 187 | iso2 | 1913.02 | 957.86 | 1914.03 | 957.52 | 638.68 |
| 188 | Ac-ITF$r8EHWAQL$AHFA-NH₂ | 188 | | 1903.01 | 952.94 | 1904.02 | 952.51 | 635.34 |
| 189 | Ac-ITF$r8EHWAQL$AHFA-NH₂ | 189 | iso2 | 1903.01 | 953.87 | 1904.02 | 952.51 | 635.34 |
| 190 | Ac-LTF$r8AHWVQL$AHFA-NH₂ | 190 | | 1873.04 | 937.86 | 1874.05 | 937.53 | 625.35 |
| 191 | Ac-ITF$r8FYWVQL$AHFA-NH₂ | 191 | | 1975.08 | 988.83 | 1976.09 | 988.55 | 659.37 |
| 192 | Ac-ITF$r8EYWVQL$AHFA-NH₂ | 192 | | 1957.05 | 979.35 | 1958.06 | 979.53 | 653.36 |
| 193 | Ac-ITF$r8EHWVQL$AHFA-NH₂ | 193 | | 1931.05 | 967 | 1932.06 | 966.53 | 644.69 |
| 194 | Ac-ITF$r8EHWVQL$AHFA-NH₂ | 194 | iso2 | 1931.05 | 967.93 | 1932.06 | 966.53 | 644.69 |
| 195 | Ac-ETF$r8EYWAAL$SAA-NH₂ | 195 | | 1690.86 | 845.85 | 1691.87 | 846.44 | 564.63 |
| 196 | Ac-LTF$r8AYWVAL$SAA-NH₂ | 196 | | 1644.93 | 824.08 | 1645.94 | 823.47 | 549.32 |
| 197 | Ac-LTF$r8AHWAAL$SAA-NH₂ | 197 | | 1590.89 | 796.88 | 1591.9 | 796.45 | 531.3 |
| 198 | Ac-LTF$r8AEWAAL$SAA-NH₂ | 198 | | 1582.88 | 791.9 | 1583.89 | 792.45 | 528.63 |
| 199 | Ac-LTF$r8AEWAAL$SAA-NH₂ | 199 | iso2 | 1582.88 | 791.9 | 1583.89 | 792.45 | 528.63 |
| 200 | Ac-LTF$r8ASWAAL$SAA-NH₂ | 200 | | 1540.87 | 770.74 | 1541.88 | 771.44 | 514.63 |
| 201 | Ac-LTF$r8ASWAAL$SAA-NH₂ | 201 | iso2 | 1540.87 | 770.88 | 1541.88 | 771.44 | 514.63 |
| 202 | Ac-LTF$r8AYWAAL$AAIa-NH₂ | 202 | | 1713.99 | 857.39 | 1715 | 858 | 572.34 |
| 203 | Ac-LTF$r8AYWAAL$AAIa-NH₂ | 203 | iso2 | 1713.99 | 857.84 | 1715 | 858 | 572.34 |
| 204 | Ac-LTF$r8AYWAAL$AHFA-NH₂ | 204 | | 1813.99 | 907.86 | 1815 | 908 | 605.67 |
| 205 | Ac-LTF$r8EHWAQL$AHIa-NH₂ | 205 | | 1869.03 | 936.1 | 1870.04 | 935.52 | 624.02 |
| 206 | Ac-LTF$r8EHWAQL$AHIa-NH₂ | 206 | iso2 | 1869.03 | 937.03 | 1870.04 | 935.52 | 624.02 |
| 207 | Ac-LTF$r8AHWAQL$AHIa-NH₂ | 207 | | 1811.03 | 906.87 | 1812.04 | 906.52 | 604.68 |
| 208 | Ac-LTF$r8EYWAQL$AHIa-NH₂ | 208 | | 1895.04 | 949.15 | 1896.05 | 948.53 | 632.69 |
| 209 | Ac-LTF$r8AYWAQL$AAFa-NH₂ | 209 | | 1804.99 | 903.2 | 1806 | 903.5 | 602.67 |
| 210 | Ac-LTF$r8AYWAQL$AAFa-NH₂ | 210 | iso2 | 1804.99 | 903.28 | 1806 | 903.5 | 602.67 |
| 211 | Ac-LTF$r8AYWAQL$AAWa-NH₂ | 211 | | 1844 | 922.81 | 1845.01 | 923.01 | 615.67 |
| 212 | Ac-LTF$r8AYWAQL$AAVa-NH₂ | 212 | | 1756.99 | 878.86 | 1758 | 879.5 | 586.67 |
| 213 | Ac-LTF$r8AYWAQL$AAVa-NH₂ | 213 | iso2 | 1756.99 | 879.3 | 1758 | 879.5 | 586.67 |
| 214 | Ac-LTF$r8AYWAQL$AALa-NH₂ | 214 | | 1771.01 | 886.26 | 1772.02 | 886.51 | 591.34 |
| 215 | Ac-LTF$r8AYWAQL$AALa-NH₂ | 215 | iso2 | 1771.01 | 886.33 | 1772.02 | 886.51 | 591.34 |
| 216 | Ac-LTF$r8EYWAQL$AAIa-NH₂ | 216 | | 1829.01 | 914.89 | 1830.02 | 915.51 | 610.68 |
| 217 | Ac-LTF$r8EYWAQL$AAIa-NH₂ | 217 | iso2 | 1829.01 | 915.34 | 1830.02 | 915.51 | 610.68 |
| 218 | Ac-LTF$r8EYWAQL$AAFa-NH₂ | 218 | | 1863 | 932.87 | 1864.01 | 932.51 | 622.01 |
| 219 | Ac-LTF$r8EYWAQL$AAFa-NH₂ | 219 | iso2 | 1863 | 932.87 | 1864.01 | 932.51 | 622.01 |
| 220 | Ac-LTF$r8EYWAQL$AAVa-NH₂ | 220 | | 1815 | 908.23 | 1816.01 | 908.51 | 606.01 |
| 221 | Ac-LTF$r8EYWAQL$AAVa-NH₂ | 221 | iso2 | 1815 | 908.31 | 1816.01 | 908.51 | 606.01 |
| 222 | Ac-LTF$r8EHWAQL$AAIa-NH₂ | 222 | | 1803.01 | 903.17 | 1804.02 | 902.51 | 602.01 |
| 223 | Ac-LTF$r8EHWAQL$AAIa-NH₂ | 223 | iso2 | 1803.01 | 902.8 | 1804.02 | 902.51 | 602.01 |
| 224 | Ac-LTF$r8EHWAQL$AAWa-NH₂ | 224 | | 1876 | 939.34 | 1877.01 | 939.01 | 626.34 |
| 225 | Ac-LTF$r8EHWAQL$AAWa-NH₂ | 225 | iso2 | 1876 | 939.62 | 1877.01 | 939.01 | 626.34 |
| 226 | Ac-LTF$r8EHWAQL$AALa-NH₂ | 226 | | 1803.01 | 902.8 | 1804.02 | 902.51 | 602.01 |
| 227 | Ac-LTF$r8EHWAQL$AALa-NH₂ | 227 | iso2 | 1803.01 | 902.9 | 1804.02 | 902.51 | 602.01 |
| 228 | Ac-ETF$r8EHWVQL$AALa-NH₂ | 228 | | 1847 | 924.82 | 1848.01 | 924.51 | 616.67 |
| 229 | Ac-LTF$r8AYWAQL$AAAa-NH₂ | 229 | | 1728.96 | 865.89 | 1729.97 | 865.49 | 577.33 |
| 230 | Ac-LTF$r8AYWAQL$AAAa-NH₂ | 230 | iso2 | 1728.96 | 865.89 | 1729.97 | 865.49 | 577.33 |
| 231 | Ac-LTF$r8AYWAQL$AAAibA-NH₂ | 231 | | 1742.98 | 872.83 | 1743.99 | 872.5 | 582 |
| 232 | Ac-LTF$r8AYWAQL$AAAibA-NH₂ | 232 | iso2 | 1742.98 | 872.92 | 1743.99 | 872.5 | 582 |
| 233 | Ac-LTF$r8AYWAQL$AAAAa-NH₂ | 233 | | 1800 | 901.42 | 1801.01 | 901.01 | 601.01 |
| 234 | Ac-LTF$r5AYWAQL$s8AAIa-NH₂ | 234 | | 1771.01 | 887.17 | 1772.02 | 886.51 | 591.34 |
| 235 | Ac-LTF$r5AYWAQL$s8SAA-NH₂ | 235 | | 1673.92 | 838.33 | 1674.93 | 837.97 | 558.98 |
| 236 | Ac-LTF$r8AYWAQCba$AANleA-NH₂ | 236 | | 1783.01 | 892.64 | 1784.02 | 892.51 | 595.34 |
| 237 | Ac-ETF$r8AYWAQCba$AANleA-NH₂ | 237 | | 1798.97 | 900.59 | 1799.98 | 900.49 | 600.66 |
| 238 | Ac-LTF$r8EYWAQCba$AANleA-NH₂ | 238 | | 1841.01 | 922.05 | 1842.02 | 921.51 | 614.68 |
| 239 | Ac-LTF$r8AYWAQCba$AWNleA-NH₂ | 239 | | 1898.05 | 950.46 | 1899.06 | 950.03 | 633.69 |
| 240 | Ac-ETF$r8AYWAQCba$AWNleA-NH₂ | 240 | | 1914.01 | 958.11 | 1915.02 | 958.01 | 639.01 |
| 241 | Ac-LTF$r8EYWAQCba$AWNleA-NH₂ | 241 | | 1956.06 | 950.62 | 1957.07 | 979.04 | 653.03 |
| 242 | Ac-LTF$r8EYWAQCba$SAFA-NH₂ | 242 | | 1890.99 | 946.55 | 1892 | 946.5 | 631.34 |
| 243 | Ac-LTF34F2$r8EYWAQCba$SANleA-NH₂ | 243 | | 1892.99 | 947.57 | 1894 | 947.5 | 632 |
| 244 | Ac-LTF$r8EF4coohWAQCba$SANleA-NH₂ | 244 | | 1885 | 943.59 | 1886.01 | 943.51 | 629.34 |
| 245 | Ac-LTF$r8EYWSQCba$SANleA-NH₂ | 245 | | 1873 | 937.58 | 1874.01 | 937.51 | 625.34 |
| 246 | Ac-LTF$r8EYWWQCba$SANleA-NH₂ | 246 | | 1972.05 | 987.61 | 1973.06 | 987.03 | 658.36 |
| 247 | Ac-LTF$r8EYWAQCba$AAIa-NH₂ | 247 | | 1841.01 | 922.05 | 1842.02 | 921.51 | 614.68 |
| 248 | Ac-LTF34F2$r8EYWAQCba$AAIa-NH₂ | 248 | | 1876.99 | 939.99 | 1878 | 939.5 | 626.67 |
| 249 | Ac-LTF$r8EF4coohWAQCba$AAIa-NH₂ | 249 | | 1869.01 | 935.64 | 1870.02 | 935.51 | 624.01 |
| 250 | Pam-ETF$r8EYWAQCba$SAA-NH₂ | 250 | | 1956.1 | 979.57 | 1957.11 | 979.06 | 653.04 |
| 251 | Ac-LThF$r8EFWAQCba$SAA-NH₂ | 251 | | 1741.94 | 872.11 | 1742.95 | 871.98 | 581.65 |
| 252 | Ac-LTA$r8EYWAQCba$SAA-NH₂ | 252 | | 1667.89 | 835.4 | 1668.9 | 834.95 | 556.97 |
| 253 | Ac-LTF$r8EYAAQCba$SAA-NH₂ | 253 | | 1628.88 | 815.61 | 1629.89 | 815.45 | 543.97 |
| 254 | Ac-LTF$r8EY2NalAQCba$SAA-NH₂ | 254 | | 1754.93 | 879.04 | 1755.94 | 878.47 | 585.98 |
| 255 | Ac-LTF$r8AYWAQCba$SAA-NH₂ | 255 | | 1685.92 | 844.71 | 1686.93 | 843.97 | 562.98 |
| 256 | Ac-LTF$r8EYWAQCba$SAF-NH₂ | 256 | | 1819.96 | 911.41 | 1820.97 | 910.99 | 607.66 |
| 257 | Ac-LTF$r8EYWAQCba$SAFa-NH₂ | 257 | | 1890.99 | 947.41 | 1892 | 946.5 | 631.34 |
| 258 | Ac-LTF$r8AYWAQCba$SAF-NH₂ | 258 | | 1761.95 | 882.73 | 1762.96 | 881.98 | 588.32 |
| 259 | Ac-LTF34F2$r8AYWAQCba$SAF-NH₂ | 259 | | 1797.93 | 900.87 | 1798.94 | 899.97 | 600.32 |
| 260 | Ac-LTF$r8AF4coohWAQCba$SAF-NH₂ | 260 | | 1789.94 | 896.43 | 1790.95 | 895.98 | 597.65 |
| 261 | Ac-LTF$r8EY6clWAQCba$SAF-NH₂ | 261 | | 1853.92 | 929.27 | 1854.93 | 927.97 | 618.98 |
| 262 | Ac-LTF$r8AYWSQCba$SAF-NH₂ | 262 | | 1777.94 | 890.87 | 1778.95 | 889.98 | 593.65 |
| 263 | Ac-LTF$r8AYWWQCba$SAF-NH₂ | 263 | | 1876.99 | 939.91 | 1878 | 939.5 | 626.67 |
| 264 | Ac-LTF$r8AYWAQCba$AAIa-NH₂ | 264 | | 1783.01 | 893.19 | 1784.02 | 892.51 | 595.34 |
| 265 | Ac-LTF34F2$r8AYWAQCba$AAIa-NH₂ | 265 | | 1818.99 | 911.23 | 1820 | 910.5 | 607.34 |
| 266 | Ac-LTF$r8AY6clWAQCba$AAIa-NH₂ | 266 | | 1816.97 | 909.84 | 1817.98 | 909.49 | 606.66 |
| 267 | Ac-LTF$r8AF4coohWAQCba$AAIa-NH₂ | 267 | | 1811 | 906.88 | 1812.01 | 906.51 | 604.67 |
| 268 | Ac-LTF$r8EYWAQCba$AAFa-NH₂ | 268 | | 1875 | 938.6 | 1876.01 | 938.51 | 626.01 |
| 269 | Ac-LTF$r8EYWAQCba$AAFa-NH₂ | 269 | iso2 | 1875 | 938.6 | 1876.01 | 938.51 | 626.01 |
| 270 | Ac-ETF$r8AYWAQCba$AWNlea-NH₂ | 270 | | 1914.01 | 958.42 | 1915.02 | 958.01 | 639.01 |
| 271 | Ac-LTF$r8EYWAQCba$AWNlea-NH₂ | 271 | | 1956.06 | 979.42 | 1957.07 | 979.04 | 653.03 |
| 272 | Ac-ETF$r8EYWAQCba$AWNlea-NH₂ | 272 | | 1972.01 | 987.06 | 1973.02 | 987.01 | 658.34 |
| 273 | Ac-ETF$r8EYWAQCba$AWNlea-NH₂ | 273 | iso2 | 1972.01 | 987.06 | 1973.02 | 987.01 | 658.34 |
| 274 | Ac-LTF$r8AYWAQCba$SAFa-NH₂ | 274 | | 1832.99 | 917.89 | 1834 | 917.5 | 612 |
| 275 | Ac-LTF$r8AYWAQCba$SAFa-NH₂ | 275 | iso2 | 1832.99 | 918.07 | 1834 | 917.5 | 612 |
| 276 | Ac-ETF$r8AYWAQL$AWNlea-NH₂ | 276 | | 1902.01 | 952.22 | 1903.02 | 952.01 | 635.01 |
| 277 | Ac-LTF$r8EYWAQL$AWNlea-NH₂ | 277 | | 1944.06 | 973.5 | 1945.07 | 973.04 | 649.03 |
| 278 | Ac-ETF$r8EYWAQL$AWNlea-NH₂ | 278 | | 1960.01 | 981.46 | 1961.02 | 981.01 | 654.34 |
| 279 | Dmaac-LTF$r8EYWAQhL$SAA-NH₂ | 279 | | 1788.98 | 896.06 | 1789.99 | 895.5 | 597.33 |
| 280 | Hexac-LTF$r8EYWAQhL$SAA-NH₂ | 280 | | 1802 | 902.9 | 1803.01 | 902.01 | 601.67 |
| 281 | Napac-LTF$r8EYWAQhL$SAA-NH₂ | 281 | | 1871.99 | 937.58 | 1873 | 937 | 625 |
| 282 | Decac-LTF$r8EYWAQhL$SAA-NH₂ | 282 | | 1858.06 | 930.55 | 1859.07 | 930.04 | 620.36 |
| 283 | Admac-LTF$r8EYWAQhL$SAA-NH₂ | 283 | | 1866.03 | 934.07 | 1867.04 | 934.02 | 623.02 |
| 284 | Tmac-LTF$r8EYWAQhL$SAA-NH₂ | 284 | | 1787.99 | 895.41 | 1789 | 895 | 597 |
| 285 | Pam-LTF$r8EYWAQhL$SAA-NH₂ | 285 | | 1942.16 | 972.08 | 1943.17 | 972.09 | 648.39 |
| 286 | Ac-LTF$r8AYWAQCba$AANleA-NH₂ | 286 | iso2 | 1783.01 | 892.64 | 1784.02 | 892.51 | 595.34 |
| 287 | Ac-LTF34F2$r8EYWAQCba$AAIa-NH₂ | 287 | iso2 | 1876.99 | 939.62 | 1878 | 939.5 | 626.67 |
| 288 | Ac-LTF34F2$r8EYWAQCba$SAA-NH₂ | 288 | | 1779.91 | 892.07 | 1780.92 | 890.96 | 594.31 |
| 289 | Ac-LTF34F2$r8EYWAQCba$SAA-NH₂ | 289 | iso2 | 1779.91 | 891.61 | 1780.92 | 890.96 | 594.31 |
| 290 | Ac-LTF$r8EF4coohWAQCba$SAA-NH₂ | 290 | | 1771.92 | 887.54 | 1772.93 | 886.97 | 591.65 |
| 291 | Ac-LTF$r8EF4coohWAQCba$SAA-NH₂ | 291 | iso2 | 1771.92 | 887.63 | 1772.93 | 886.97 | 591.65 |
| 292 | Ac-LTF$r8EYWSQCba$SAA-NH₂ | 292 | | 1759.92 | 881.9 | 1760.93 | 880.97 | 587.65 |
| 293 | Ac-LTF$r8EYWSQCba$SAA-NH₂ | 293 | iso2 | 1759.92 | 881.9 | 1760.93 | 880.97 | 587.65 |
| 294 | Ac-LTF$r8EYWAQhL$SAA-NH₂ | 294 | | 1745.94 | 875.05 | 1746.95 | 873.98 | 582.99 |
| 295 | Ac-LTF$r8AYWAQhL$SAF-NH₂ | 295 | | 1763.97 | 884.02 | 1764.98 | 882.99 | 589 |
| 296 | Ac-LTF$r8AYWAQhL$SAF-NH₂ | 296 | iso2 | 1763.97 | 883.56 | 1764.98 | 882.99 | 589 |
| 297 | Ac-LTF34F2$r8AYWAQhL$SAA-NH₂ | 297 | | 1723.92 | 863.67 | 1724.93 | 862.97 | 575.65 |
| 298 | Ac-LTF34F2$r8AYWAQhL$SAA-NH₂ | 298 | iso2 | 1723.92 | 864.04 | 1724.93 | 862.97 | 575.65 |
| 299 | Ac-LTF$r8AF4coohWAQhL$SAA-NH₂ | 299 | | 1715.93 | 859.44 | 1716.94 | 858.97 | 572.98 |
| 300 | Ac-LTF$r8AF4coohWAQhL$SAA-NH₂ | 300 | iso2 | 1715.93 | 859.6 | 1716.94 | 858.97 | 572.98 |
| 301 | Ac-LTF$r8AYWSQhL$SAA-NH₂ | 301 | | 1703.93 | 853.96 | 1704.94 | 852.97 | 568.98 |
| 302 | Ac-LTF$r8AYWSQhL$SAA-NH₂ | 302 | iso2 | 1703.93 | 853.59 | 1704.94 | 852.97 | 568.98 |
| 303 | Ac-LTF$r8EYWAQL$AANleA-NH₂ | 303 | | 1829.01 | 915.45 | 1830.02 | 915.51 | 610.68 |
| 304 | Ac-LTF34F2$r8AYWAQL$AANleA-NH₂ | 304 | | 1806.99 | 904.58 | 1808 | 904.5 | 603.34 |
| 305 | Ac-LTF$r8AF4coohWAQL$AANleA-NH₂ | 305 | | 1799 | 901.6 | 1800.01 | 900.51 | 600.67 |
| 306 | Ac-LTF$r8AYWSQL$AANleA-NH₂ | 306 | | 1787 | 894.75 | 1788.01 | 894.51 | 596.67 |
| 307 | Ac-LTF34F2$r8AYWAQhL$AANleA-NH₂ | 307 | | 1821 | 911.79 | 1822.01 | 911.51 | 608.01 |
| 308 | Ac-LTF34F2$r8AYWAQhL$AANleA-NH₂ | 308 | iso2 | 1821 | 912.61 | 1822.01 | 911.51 | 608.01 |
| 309 | Ac-LTF$r8AF4coohWAQhL$AANleA-NH₂ | 309 | | 1813.02 | 907.95 | 1814.03 | 907.52 | 605.35 |
| 310 | Ac-LTF$r8AF4coohWAQhL$AANleA-NH₂ | 310 | iso2 | 1813.02 | 908.54 | 1814.03 | 907.52 | 605.35 |
| 311 | Ac-LTF$r8AYWSQhL$AANleA-NH₂ | 311 | | 1801.02 | 901.84 | 1802.03 | 901.52 | 601.35 |
| 312 | Ac-LTF$r8AYWSQhL$AANleA-NH₂ | 312 | iso2 | 1801.02 | 902.62 | 1802.03 | 901.52 | 601.35 |
| 313 | Ac-LTF$r8AYWAQhL$AAAAa-NH₂ | 313 | | 1814.01 | 908.63 | 1815.02 | 908.01 | 605.68 |
| 314 | Ac-LTF$r8AYWAQhL$AAAAa-NH₂ | 314 | iso2 | 1814.01 | 908.34 | 1815.02 | 908.01 | 605.68 |
| 315 | Ac-LTF$r8AYWAQL$AAAAAa-NH₂ | 315 | | 1871.04 | 936.94 | 1872.05 | 936.53 | 624.69 |
| 316 | Ac-LTF$r8AYWAQL$AAAAAAa-NH₂ | 316 | iso2 | 1942.07 | 972.5 | 1943.08 | 972.04 | 648.37 |
| 317 | Ac-LTF$r8AYWAQL$AAAAAAa-NH₂ | 317 | iso1 | 1942.07 | 972.5 | 1943.08 | 972.04 | 648.37 |
| 318 | Ac-LTF$r8EYWAQhL$AANleA-NH₂ | 318 | | 1843.03 | 922.54 | 1844.04 | 922.52 | 615.35 |
| 319 | Ac-AATF$r8AYWAQL$AANleA-NH₂ | 319 | | 1800 | 901.39 | 1801.01 | 901.01 | 601.01 |
| 320 | Ac-LTF$r8AYWAQL$AANleAA-NH₂ | 320 | | 1842.04 | 922.45 | 1843.05 | 922.03 | 615.02 |
| 321 | Ac-ALTF$r8AYWAQL$AANleAA-NH₂ | 321 | | 1913.08 | 957.94 | 1914.09 | 957.55 | 638.7 |
| 322 | Ac-LTF$r8AYWAQCba$AANleAA-NH₂ | 322 | | 1854.04 | 928.43 | 1855.05 | 928.03 | 619.02 |
| 323 | Ac-LTF$r8AYWAQhL$AANleAA-NH₂ | 323 | | 1856.06 | 929.4 | 1857.07 | 929.04 | 619.69 |
| 324 | Ac-LTF$r8EYWAQCba$SAAA-NH₂ | 324 | | 1814.96 | 909.37 | 1815.97 | 908.49 | 605.99 |
| 325 | Ac-LTF$r8EYWAQCba$SAAA-NH₂ | 325 | iso2 | 1814.96 | 909.37 | 1815.97 | 908.49 | 605.99 |
| 326 | Ac-LTF$r8EYWAQCba$SAAAA-NH₂ | 326 | | 1886 | 944.61 | 1887.01 | 944.01 | 629.67 |
| 327 | Ac-LTF$r8EYWAQCba$SAAAA-NH₂ | 327 | iso2 | 1886 | 944.61 | 1887.01 | 944.01 | 629.67 |
| 328 | Ac-ALTF$r8EYWAQCba$SAA-NH₂ | 328 | | 1814.96 | 909.09 | 1815.97 | 908.49 | 605.99 |
| 329 | Ac-ALTF$r8EYWAQCba$SAAA-NH₂ | 329 | | 1886 | 944.61 | 1887.01 | 944.01 | 629.67 |
| 330 | Ac-ALTF$r8EYWAQCba$SAA-NH₂ | 330 | iso2 | 1814.96 | 909.09 | 1815.97 | 908.49 | 605.99 |
| 331 | Ac-LTF$r8EYWAQL$AAAAAa-NH₂ | 331 | iso2 | 1929.04 | 966.08 | 1930.05 | 965.53 | 644.02 |
| 332 | Ac-LTF$r8EY6clWAQCba$SAA-NH₂ | 332 | | 1777.89 | 890.78 | 1778.9 | 889.95 | 593.64 |
| 333 | Ac-LTF$r8EF4cooh6clWAQCba$SANleA-NH₂ | 333 | | 1918.96 | 961.27 | 1919.97 | 960.49 | 640.66 |
| 334 | Ac-LTF$r8EF4cooh6clWAQCba$SANleA-NH₂ | 334 | iso2 | 1918.96 | 961.27 | 1919.97 | 960.49 | 640.66 |
| 335 | Ac-LTF$r8EF4cooh6clWAQCba$AAIa-NH₂ | 335 | | 1902.97 | 953.03 | 1903.98 | 952.49 | 635.33 |
| 336 | Ac-LTF$r8EF4cooh6clWAQCba$AAIa-NH₂ | 336 | iso2 | 1902.97 | 953.13 | 1903.98 | 952.49 | 635.33 |
| 337 | Ac-LTF$r8AY6clWAQL$AAAAAa-NH₂ | 337 | | 1905 | 954.61 | 1906.01 | 953.51 | 636.01 |
| 338 | Ac-LTF$r8AY6clWAQL$AAAAAa-NH₂ | 338 | iso2 | 1905 | 954.9 | 1906.01 | 953.51 | 636.01 |
| 339 | Ac-F$r8AY6clWEAL$AAAAAAa-NH₂ | 339 | | 1762.89 | 883.01 | 1763.9 | 882.45 | 588.64 |
| 340 | Ac-ETF$r8EYWAQL$AAAAAa-NH₂ | 340 | | 1945 | 974.31 | 1946.01 | 973.51 | 649.34 |
| 341 | Ac-ETF$r8EYWAQL$AAAAAa-NH₂ | 341 | iso2 | 1945 | 974.49 | 1946.01 | 973.51 | 649.34 |
| 342 | Ac-LTF$r8EYWAQL$AAAAAAa-NH₂ | 342 | | 2000.08 | 1001.6 | 2001.09 | 1001.05 | 667.7 |
| 343 | Ac-LTF$r8EYWAQL$AAAAAAa-NH₂ | 343 | iso2 | 2000.08 | 1001.6 | 2001.09 | 1001.05 | 667.7 |
| 344 | Ac-LTF$r8AYWAQL$AANleAAa-NH₂ | 344 | | 1913.08 | 958.58 | 1914.09 | 957.55 | 638.7 |
| 345 | Ac-LTF$r8AYWAQL$AANleAAa-NH₂ | 345 | iso2 | 1913.08 | 958.58 | 1914.09 | 957.55 | 638.7 |
| 346 | Ac-LTF$r8EYWAQCba$AAAAAa-NH₂ | 346 | | 1941.04 | 972.55 | 1942.05 | 971.53 | 648.02 |
| 347 | Ac-LTF$r8EYWAQCba$AAAAAa-NH₂ | 347 | iso2 | 1941.04 | 972.55 | 1942.05 | 971.53 | 648.02 |
| 348 | Ac-LTF$r8EF4coohWAQCba$AAAAAa-NH₂ | 348 | | 1969.04 | 986.33 | 1970.05 | 985.53 | 657.35 |
| 349 | Ac-LTF$r8EF4coohWAQCba$AAAAAa-NH₂ | 349 | iso2 | 1969.04 | 986.06 | 1970.05 | 985.53 | 657.35 |
| 350 | Ac-LTF$r8EYWSQCba$AAAAAa-NH₂ | 350 | | 1957.04 | 980.04 | 1958.05 | 979.53 | 653.35 |
| 351 | Ac-LTF$r8EYWSQCba$AAAAAa-NH₂ | 351 | iso2 | 1957.04 | 980.04 | 1958.05 | 979.53 | 653.35 |
| 352 | Ac-LTF$r8EYWAQCba$SAAa-NH₂ | 352 | | 1814.96 | 909 | 1815.97 | 908.49 | 605.99 |
| 353 | Ac-LTF$r8EYWAQCba$SAAa-NH₂ | 353 | iso2 | 1814.96 | 909 | 1815.97 | 908.49 | 605.99 |
| 354 | Ac-ALTF$r8EYWAQCba$SAAa-NH₂ | 354 | | 1886 | 944.52 | 1887.01 | 944.01 | 629.67 |
| 355 | Ac-ALTF$r8EYWAQCba$SAAa-NH₂ | 355 | iso2 | 1886 | 944.98 | 1887.01 | 944.01 | 629.67 |
| 356 | Ac-ALTF$r8EYWAQCba$SAAAa-NH₂ | 356 | | 1957.04 | 980.04 | 1958.05 | 979.53 | 653.35 |
| 357 | Ac-ALTF$r8EYWAQCba$SAAAa-NH₂ | 357 | iso2 | 1957.04 | 980.04 | 1958.05 | 979.53 | 653.35 |
| 358 | Ac-AALTF$r8EYWAQCba$SAAAa-NH₂ | 358 | | 2028.07 | 1016.1 | 2029.08 | 1015.04 | 677.03 |
| 359 | Ac-AALTF$r8EYWAQCba$SAAAa-NH₂ | 359 | iso2 | 2028.07 | 1015.57 | 2029.08 | 1015.04 | 677.03 |
| 360 | Ac-RTF$r8EYWAQCba$SAA-NH₂ | 360 | | 1786.94 | 895.03 | 1787.95 | 894.48 | 596.65 |
| 361 | Ac-LRF$r8EYWAQCba$SAA-NH₂ | 361 | | 1798.98 | 901.51 | 1799.99 | 900.5 | 600.67 |
| 362 | Ac-LTF$r8EYWRQCba$SAA-NH₂ | 362 | | 1828.99 | 916.4 | 1830 | 915.5 | 610.67 |
| 363 | Ac-LTF$r8EYWARCba$SAA-NH₂ | 363 | | 1771.97 | 887.63 | 1772.98 | 886.99 | 591.66 |
| 364 | Ac-LTF$r8EYWAQCba$RAA-NH₂ | 364 | | 1812.99 | 908.08 | 1814 | 907.5 | 605.34 |
| 365 | Ac-LTF$r8EYWAQCba$SRA-NH₂ | 365 | | 1828.99 | 916.12 | 1830 | 915.5 | 610.67 |
| 366 | Ac-LTF$r8EYWAQCba$SAR-NH₂ | 366 | | 1828.99 | 916.12 | 1830 | 915.5 | 610.67 |
| 367 | 5-FAM-BaLTF$r8EYWAQCba$SAA-NH₂ | 367 | | 2131 | 1067.09 | 2132.01 | 1066.51 | 711.34 |
| 368 | 5-FAM-BaLTF$r8AYWAQL$AANleA-NH₂ | 368 | | 2158.08 | 1080.6 | 2159.09 | 1080.05 | 720.37 |
| 369 | Ac-LAF$r8EYWAQL$AANleA-NH₂ | 369 | | 1799 | 901.05 | 1800.01 | 900.51 | 600.67 |
| 370 | Ac-ATF$r8EYWAQL$AANleA-NH₂ | 370 | | 1786.97 | 895.03 | 1787.98 | 894.49 | 596.66 |
| 371 | Ac-AAF$r8EYWAQL$AANleA-NH₂ | 371 | | 1756.96 | 880.05 | 1757.97 | 879.49 | 586.66 |
| 372 | Ac-AAAF$r8EYWAQL$AANleA-NH₂ | 372 | | 1827.99 | 915.57 | 1829 | 915 | 610.34 |
| 373 | Ac-AAAAF$r8EYWAQL$AANleA-NH₂ | 373 | | 1899.03 | 951.09 | 1900.04 | 950.52 | 634.02 |
| 374 | Ac-AATF$r8EYWAQL$AANleA-NH₂ | 374 | | 1858 | 930.92 | 1859.01 | 930.01 | 620.34 |
| 375 | Ac-AALTF$r8EYWAQL$AANleA-NH₂ | 375 | | 1971.09 | 987.17 | 1972.1 | 986.55 | 658.04 |
| 376 | Ac-AAALTF$r8EYWAQL$AANleA-NH₂ | 376 | | 2042.12 | 1023.15 | 2043.13 | 1022.07 | 681.71 |
| 377 | Ac-LTF$r8EYWAQL$AANleAA-NH₂ | 377 | | 1900.05 | 952.02 | 1901.06 | 951.03 | 634.36 |
| 378 | Ac-ALTF$r8EYWAQL$AANleAA-NH₂ | 378 | | 1971.09 | 987.63 | 1972.1 | 986.55 | 658.04 |
| 379 | Ac-AALTF$r8EYWAQL$AANleAA-NH₂ | 379 | | 2042.12 | 1022.69 | 2043.13 | 1022.07 | 681.71 |
| 380 | Ac-LTF$r8EYWAQCba$AANleAA-NH₂ | 380 | | 1912.05 | 958.03 | 1913.06 | 957.03 | 638.36 |
| 381 | Ac-LTF$r8EYWAQhL$AANleAA-NH₂ | 381 | | 1914.07 | 958.68 | 1915.08 | 958.04 | 639.03 |
| 382 | Ac-ALTF$r8EYWAQhL$AANleAA-NH₂ | 382 | | 1985.1 | 994.1 | 1986.11 | 993.56 | 662.71 |
| 383 | Ac-LTF$r8ANmYWAQL$AANleA-NH₂ | 383 | | 1785.02 | 894.11 | 1786.03 | 893.52 | 596.01 |
| 384 | Ac-LTF$r8ANmYWAQL$AANleA-NH₂ | 384 | iso2 | 1785.02 | 894.11 | 1786.03 | 893.52 | 596.01 |
| 385 | Ac-LTF$r8AYNmWAQL$AANleA-NH₂ | 385 | | 1785.02 | 894.11 | 1786.03 | 893.52 | 596.01 |
| 386 | Ac-LTF$r8AYNmWAQL$AANleA-NH₂ | 386 | iso2 | 1785.02 | 894.11 | 1786.03 | 893.52 | 596.01 |
| 387 | Ac-LTF$r8AYAmwAQL$AANleA-NH₂ | 387 | | 1785.02 | 894.01 | 1786.03 | 893.52 | 596.01 |
| 388 | Ac-LTF$r8AYAmwAQL$AANleA-NH₂ | 388 | iso2 | 1785.02 | 894.01 | 1786.03 | 893.52 | 596.01 |
| 389 | Ac-LTF$r8AYWAibQL$AANleA-NH₂ | 389 | | 1785.02 | 894.01 | 1786.03 | 893.52 | 596.01 |
| 390 | Ac-LTF$r8AYWAibQL$AANleA-NH₂ | 390 | iso2 | 1785.02 | 894.01 | 1786.03 | 893.52 | 596.01 |
| 391 | Ac-LTF$r8AYWAQL$AAibNleA-NH₂ | 391 | | 1785.02 | 894.38 | 1786.03 | 893.52 | 596.01 |
| 392 | Ac-LTF$r8AYWAQL$AAibNleA-NH₂ | 392 | iso2 | 1785.02 | 894.38 | 1786.03 | 893.52 | 596.01 |
| 393 | Ac-LTF$r8AYWAQL$AaNleA-NH₂ | 393 | | 1771.01 | 887.54 | 1772.02 | 886.51 | 591.34 |
| 394 | Ac-LTF$r8AYWAQL$AaNleA-NH₂ | 394 | iso2 | 1771.01 | 887.54 | 1772.02 | 886.51 | 591.34 |
| 395 | Ac-LTF$r8AYWAQL$ASarNleA-NH₂ | 395 | | 1771.01 | 887.35 | 1772.02 | 886.51 | 591.34 |
| 396 | Ac-LTF$r8AYWAQL$ASarNleA-NH₂ | 396 | iso2 | 1771.01 | 887.35 | 1772.02 | 886.51 | 591.34 |
| 397 | Ac-LTF$r8AYWAQL$AANleAib-NH₂ | 397 | | 1785.02 | 894.75 | 1786.03 | 893.52 | 596.01 |
| 398 | Ac-LTF$r8AYWAQL$AANleAib-NH₂ | 398 | iso2 | 1785.02 | 894.75 | 1786.03 | 893.52 | 596.01 |
| 399 | Ac-LTF$r8AYWAQL$AANleNmA-NH₂ | 399 | | 1785.02 | 894.6 | 1786.03 | 893.52 | 596.01 |
| 400 | Ac-LTF$r8AYWAQL$AANleNmA-NH₂ | 400 | iso2 | 1785.02 | 894.6 | 1786.03 | 893.52 | 596.01 |
| 401 | Ac-LTF$r8AYWAQL$AANleSar-NH₂ | 401 | | 1771.01 | 886.98 | 1772.02 | 886.51 | 591.34 |
| 402 | Ac-LTF$r8AYWAQL$AANleSar-NH₂ | 402 | iso2 | 1771.01 | 886.98 | 1772.02 | 886.51 | 591.34 |
| 403 | Ac-LTF$r8AYWAQL$AANleAAib-NH₂ | 403 | | 1856.06 | | 1857.07 | 929.04 | 619.69 |
| 404 | Ac-LTF$r8AYWAQL$AANleAAib-NH₂ | 404 | iso2 | 1856.06 | | 1857.07 | 929.04 | 619.69 |
| 405 | Ac-LTF$r8AYWAQL$AANleANmA-NH₂ | 405 | | 1856.06 | 930.37 | 1857.07 | 929.04 | 619.69 |
| 406 | Ac-LTF$r8AYWAQL$AANleANmA-NH₂ | 406 | iso2 | 1856.06 | 930.37 | 1857.07 | 929.04 | 619.69 |
| 407 | Ac-LTF$r8AYWAQL$AANleAa-NH₂ | 407 | | 1842.04 | 922.69 | 1843.05 | 922.03 | 615.02 |
| 408 | Ac-LTF$r8AYWAQL$AANleAa-NH₂ | 408 | iso2 | 1842.04 | 922.69 | 1843.05 | 922.03 | 615.02 |
| 409 | Ac-LTF$r8AYWAQL$AANleASar-NH₂ | 409 | | 1842.04 | 922.6 | 1843.05 | 922.03 | 615.02 |
| 410 | Ac-LTF$r8AYWAQL$AANleASar-NH₂ | 410 | iso2 | 1842.04 | 922.6 | 1843.05 | 922.03 | 615.02 |
| 411 | Ac-LTF$/r8AYWAQL$/AANleA-NH₂ | 411 | | 1799.04 | 901.14 | 1800.05 | 900.53 | 600.69 |
| 412 | Ac-LTFAibAYWAQLAibAANleA-NH₂ | 412 | | 1648.9 | 826.02 | 1649.91 | 825.46 | 550.64 |
| 413 | Ac-LTF$r8Cou4YWAQL$AANleA-NH₂ | 413 | | 1975.05 | 989.11 | 1976.06 | 988.53 | 659.36 |
| 414 | Ac-LTF$r8Cou4YWAQL$AANleA-NH₂ | 414 | iso2 | 1975.05 | 989.11 | 1976.06 | 988.53 | 659.36 |
| 415 | Ac-LTF$r8AYWCou4QL$AANleA-NH₂ | 415 | | 1975.05 | 989.11 | 1976.06 | 988.53 | 659.36 |
| 416 | Ac-LTF$r8AYWAQL$Cou4ANleA-NH₂ | 416 | | 1975.05 | 989.57 | 1976.06 | 988.53 | 659.36 |
| 417 | Ac-LTF$r8AYWAQL$Cou4ANleA-NH₂ | 417 | iso2 | 1975.05 | 989.57 | 1976.06 | 988.53 | 659.36 |
| 418 | Ac-LTF$r8AYWAQL$ACou4NleA-NH₂ | 418 | | 1975.05 | 989.57 | 1976.06 | 988.53 | 659.36 |
| 419 | Ac-LTF$r8AYWAQL$ACou4NleA-NH₂ | 419 | iso2 | 1975.05 | 989.57 | 1976.06 | 988.53 | 659.36 |
| 420 | Ac-LTF$r8AYWAQL$AANleA-OH | 420 | | 1771.99 | 887.63 | 1773 | 887 | 591.67 |
| 421 | Ac-LTF$r8AYWAQL$AANleA-OH | 421 | iso2 | 1771.99 | 887.63 | 1773 | 887 | 591.67 |
| 422 | Ac-LTF$r8AYWAQL$AANleA-NHnPr | 422 | | 1813.05 | 908.08 | 1814.06 | 907.53 | 605.36 |
| 423 | Ac-LTF$r8AYWAQL$AANleA-NHnPr | 423 | iso2 | 1813.05 | 908.08 | 1814.06 | 907.53 | 605.36 |
| 424 | Ac-LTF$r8AYWAQL$AANleA-NHnBu33Me | 424 | | 1855.1 | 929.17 | 1856.11 | 928.56 | 619.37 |
| 425 | Ac-LTF$r8AYWAQL$AANleA-NHnBu33Me | 425 | iso2 | 1855.1 | 929.17 | 1856.11 | 928.56 | 619.37 |
| 426 | Ac-LTF$r8AYWAQL$AANleA-NHHex | 426 | | 1855.1 | 929.17 | 1856.11 | 928.56 | 619.37 |
| 427 | Ac-LTF$r8AYWAQL$AANleA-NHHex | 427 | iso2 | 1855.1 | 929.17 | 1856.11 | 928.56 | 619.37 |
| 428 | Ac-LTA$r8AYWAQL$AANleA-NH₂ | 428 | | 1694.98 | 849.33 | 1695.99 | 848.5 | 566 |
| 429 | Ac-LThL$r8AYWAQL$AANleA-NH₂ | 429 | | 1751.04 | 877.09 | 1752.05 | 876.53 | 584.69 |
| 430 | Ac-LTF$r8AYAAQL$AANleA-NH₂ | 430 | | 1655.97 | 829.54 | 1656.98 | 828.99 | 553 |
| 431 | Ac-LTF$r8AY2NalAQL$AANleA-NH₂ | 431 | | 1782.01 | 892.63 | 1783.02 | 892.01 | 595.01 |
| 432 | Ac-LTF$r8EYWCou4QCba$SAA-NH₂ | 432 | | 1947.97 | 975.8 | 1948.98 | 974.99 | 650.33 |
| 433 | Ac-LTF$r8EYWCou7QCba$SAA-NH₂ | 433 | | 16.03 | 974.9 | 17.04 | 9.02 | 6.35 |
| 434 | Ac-LTF % r8EYWAQCba % SAA-NH₂ | 434 | | 1745.94 | 874.8 | 1746.95 | 873.98 | 582.99 |
| 435 | Dmaac-LTF$r8EYWAQCba$SAA-NH₂ | 435 | | 1786.97 | 894.8 | 1787.98 | 894.49 | 596.66 |
| 436 | Dmaac-LTF$r8AYWAQL$AAAAAa-NH₂ | 436 | | 1914.08 | 958.2 | 1915.09 | 958.05 | 639.03 |
| 437 | Dmaac-LTF$r8AYWAQL$AAAAAa-NH₂ | 437 | iso2 | 1914.08 | 958.2 | 1915.09 | 958.05 | 639.03 |
| 438 | Dmaac-LTF$r8EYWAQL$AAAAAa-NH₂ | 438 | | 1972.08 | 987.3 | 1973.09 | 987.05 | 658.37 |
| 439 | Dmaac-LTF$r8EYWAQL$AAAAAa-NH₂ | 439 | iso2 | 1972.08 | 987.3 | 1973.09 | 987.05 | 658.37 |
| 440 | Dmaac-LTF$r8EF4coohWAQCba$AAIa-NH₂ | 440 | | 1912.05 | 957.4 | 1913.06 | 957.03 | 638.36 |
| 441 | Dmaac-LTF$r8EF4coohWAQCba$AAIa-NH₂ | 441 | iso2 | 1912.05 | 957.4 | 1913.06 | 957.03 | 638.36 |
| 442 | Dmaac-LTF$r8AYWAQL$AANleA-NH₂ | 442 | | 1814.05 | 908.3 | 1815.06 | 908.03 | 605.69 |
| 443 | Dmaac-LTF$r8AYWAQL$AANleA-NH₂ | 443 | iso2 | 1814.05 | 908.3 | 1815.06 | 908.03 | 605.69 |
| 444 | Ac-LTF % r8AYWAQL % AANleA-NH₂ | 444 | | 1773.02 | 888.37 | 1774.03 | 887.52 | 592.01 |
| 445 | Ac-LTF % r8EYWAQL % AAAAAa-NH₂ | 445 | | 1931.06 | 966.4 | 1932.07 | 966.54 | 644.69 |
| 446 | Cou6BaLTF$r8EYWAQhL$SAA-NH₂ | 446 | | 2018.05 | 1009.9 | 2019.06 | 1010.03 | 673.69 |
| 447 | Cou8BaLTF$r8EYWAQhL$SAA-NH₂ | 447 | | 1962.96 | 982.34 | 1963.97 | 982.49 | 655.32 |
| 448 | Ac-LTF4I$r8EYWAQL$AAAAAa-NH₂ | 448 | | 2054.93 | 1028.68 | 2055.94 | 1028.47 | 685.98 |
| 449 | Ac-LTF$r8EYWAQL$AAAAAa-NH₂ | 449 | | 1929.04 | 966.17 | 1930.05 | 965.53 | 644.02 |
| 550 | Ac-LTF$r8EYWAQL$AAAAAa-OH | 450 | | 1930.02 | 966.54 | 1931.03 | 966.02 | 644.35 |
| 551 | Ac-LTF$r8EYWAQL$AAAAAa-OH | 451 | iso2 | 1930.02 | 965.89 | 1931.03 | 966.02 | 644.35 |
| 552 | Ac-LTF$r8EYWAEL$AAAAAa-NH₂ | 452 | | 1930.02 | 966.82 | 1931.03 | 966.02 | 644.35 |
| 553 | Ac-LTF$r8EYWAEL$AAAAAa-NH₂ | 453 | iso2 | 1930.02 | 966.91 | 1931.03 | 966.02 | 644.35 |
| 554 | Ac-LTF$r8EYWAEL$AAAAAa-OH | 454 | | 1931.01 | 967.28 | 1932.02 | 966.51 | 644.68 |
| 555 | Ac-LTF$r8EY6clWAQL$AAAAAa-NH₂ | 455 | | 1963 | 983.28 | 1964.01 | 982.51 | 655.34 |
| 556 | Ac-LTF$r8EF4bOH2WAQL$AAAAAa-NH₂ | 456 | | 1957.05 | 980.04 | 1958.06 | 979.53 | 653.36 |
| 557 | Ac-AAALTF$r8EYWAQL$AAAAAa-NH₂ | 457 | | 2142.15 | 1072.83 | 2143.16 | 1072.08 | 715.06 |
| 558 | Ac-LTF34F2$r8EYWAQL$AAAAAa-NH₂ | 458 | | 1965.02 | 984.3 | 1966.03 | 983.52 | 656.01 |
| 559 | Ac-RTF$r8EYWAQL$AAAAAa-NH₂ | 459 | | 1972.06 | 987.81 | 1973.07 | 987.04 | 658.36 |
| 560 | Ac-LTA$r8EYWAQL$AAAAAa-NH₂ | 460 | | 1853.01 | 928.33 | 1854.02 | 927.51 | 618.68 |
| 561 | Ac-LTF$r8EYWAibQL$AAAAAa-NH₂ | 461 | | 1943.06 | 973.48 | 1944.07 | 972.54 | 648.69 |
| 562 | Ac-LTF$r8EYWAQL$AAibAAAa-NH₂ | 462 | | 1943.06 | 973.11 | 1944.07 | 972.54 | 648.69 |
| 563 | Ac-LTF$r8EYWAQL$AAAibAAa-NH₂ | 463 | | 1943.06 | 973.48 | 1944.07 | 972.54 | 648.69 |
| 564 | Ac-LTF$r8EYWAQL$AAAAibAa-NH₂ | 464 | | 1943.06 | 973.48 | 1944.07 | 972.54 | 648.69 |
| 565 | Ac-LTF$r8EYWAQL$AAAAAiba-NH₂ | 465 | | 1943.06 | 973.38 | 1944.07 | 972.54 | 648.69 |
| 566 | Ac-LTF$r8EYWAQL$AAAAAiba-NH₂ | 466 | iso2 | 1943.06 | 973.38 | 1944.07 | 972.54 | 648.69 |
| 567 | Ac-LTF$r8EYWAQL$AAAAAAib-NH₂ | 467 | | 1943.06 | 973.01 | 1944.07 | 972.54 | 648.69 |
| 568 | Ac-LTF$r8EYWAQL$AaAAAa-NH₂ | 468 | | 1929.04 | 966.54 | 1930.05 | 965.53 | 644.02 |
| 569 | Ac-LTF$r8EYWAQL$AAaAAa-NH₂ | 469 | | 1929.04 | 966.35 | 1930.05 | 965.53 | 644.02 |
| 570 | Ac-LTF$r8EYWAQL$AAAaAa-NH₂ | 470 | | 1929.04 | 966.54 | 1930.05 | 965.53 | 644.02 |
| 571 | Ac-LTF$r8EYWAQL$AAAaAa-NH₂ | 471 | iso2 | 1929.04 | 966.35 | 1930.05 | 965.53 | 644.02 |
| 572 | Ac-LTF$r8EYWAQL$AAAAaa-NH₂ | 472 | | 1929.04 | 966.35 | 1930.05 | 965.53 | 644.02 |
| 573 | Ac-LTF$r8EYWAQL$AAAAAA-NH₂ | 473 | | 1929.04 | 966.35 | 1930.05 | 965.53 | 644.02 |
| 574 | Ac-LTF$r8EYWAQL$ASarAAAa-NH₂ | 474 | | 1929.04 | 966.54 | 1930.05 | 965.53 | 644.02 |
| 575 | Ac-LTF$r8EYWAQL$AASarAAa-NH₂ | 475 | | 1929.04 | 966.35 | 1930.05 | 965.53 | 644.02 |
| 576 | Ac-LTF$r8EYWAQL$AAASarAa-NH₂ | 476 | | 1929.04 | 966.35 | 1930.05 | 965.53 | 644.02 |
| 577 | Ac-LTF$r8EYWAQL$AAAASara-NH₂ | 477 | | 1929.04 | 966.35 | 1930.05 | 965.53 | 644.02 |
| 578 | Ac-LTF$r8EYWAQL$AAAAASar-NH₂ | 478 | | 1929.04 | 966.08 | 1930.05 | 965.53 | 644.02 |
| 579 | Ac-7LTF$r8EYWAQL$AAAAAa-NH₂ | 479 | | 1918.07 | 951.99 | 1919.08 | 960.04 | 640.37 |
| 581 | Ac-TF$r8EYWAQL$AAAAAa-NH₂ | 480 | | 1815.96 | 929.85 | 1816.97 | 908.99 | 606.33 |
| 582 | Ac-F$r8EYWAQL$AAAAAa-NH₂ | 481 | | 1714.91 | 930.92 | 1715.92 | 858.46 | 572.64 |
| 583 | Ac-LVF$r8EYWAQL$AAAAAa-NH₂ | 482 | | 1927.06 | 895.12 | 1928.07 | 964.54 | 643.36 |
| 584 | Ac-AAF$r8EYWAQL$AAAAAa-NH₂ | 483 | | 1856.98 | 859.51 | 1857.99 | 929.5 | 620 |
| 585 | Ac-LTF$r8EYWAQL$AAAAa-NH₂ | 484 | | 1858 | 824.08 | 1859.01 | 930.01 | 620.34 |
| 586 | Ac-LTF$r8EYWAQL$AAAa-NH₂ | 485 | | 1786.97 | 788.56 | 1787.98 | 894.49 | 596.66 |
| 587 | Ac-LTF$r8EYWAQL$AAa-NH₂ | 486 | | 1715.93 | 1138.57 | 1716.94 | 858.97 | 572.98 |
| 588 | Ac-LTF$r8EYWAQL$Aa-NH₂ | 487 | | 1644.89 | 1144.98 | 1645.9 | 823.45 | 549.3 |
| 589 | Ac-LTF$r8EYWAQL$a-NH₂ | 488 | | 1573.85 | 1113.71 | 1574.86 | 787.93 | 525.62 |
| 590 | Ac-LTF$r8EYWAQL$AAA-OH | 489 | | 1716.91 | 859.55 | 1717.92 | 859.46 | 573.31 |
| 591 | Ac-LTF$r8EYWAQL$A-OH | 490 | | 1574.84 | 975.14 | 1575.85 | 788.43 | 525.95 |
| 592 | Ac-LTF$r8EYWAQL$AAA-NH₂ | 491 | | 1715.93 | 904.75 | 1716.94 | 858.97 | 572.98 |
| 593 | Ac-LTF$r8EYWAQCba$SAA-OH | 492 | | 1744.91 | 802.49 | 1745.92 | 873.46 | 582.64 |
| 594 | Ac-LTF$r8EYWAQCba$S-OH | 493 | | 1602.83 | 913.53 | 1603.84 | 802.42 | 535.28 |
| 595 | Ac-LTF$r8EYWAQCba$S-NH₂ | 494 | | 1601.85 | 979.58 | 1602.86 | 801.93 | 534.96 |
| 596 | 4-FBzl-LTF$r8EYWAQL$AAAAAa-NH₂ | 495 | | 2009.05 | 970.52 | 2010.06 | 1005.53 | 670.69 |
| 597 | 4-FBzl-LTF$r8EYWAQCba$SAA-NH₂ | 496 | | 1823.93 | 965.8 | 1824.94 | 912.97 | 608.98 |
| 598 | Ac-LTF$r8RYWAQL$AAAAAa-NH₂ | 497 | | 1956.1 | 988.28 | 1957.11 | 979.06 | 653.04 |
| 599 | Ac-LTF$r8HYWAQL$AAAAAa-NH₂ | 498 | | 1937.06 | 1003.54 | 1938.07 | 969.54 | 646.69 |
| 600 | Ac-LTF$r8QYWAQL$AAAAAa-NH₂ | 499 | | 1928.06 | 993.92 | 1929.07 | 965.04 | 643.69 |
| 601 | Ac-LTF$r8CitYWAQL$AAAAAa-NH₂ | 500 | | 1957.08 | 987 | 1958.09 | 979.55 | 653.37 |
| 602 | Ac-LTF$r8GlaYWAQL$AAAAAa-NH₂ | 501 | | 1973.03 | 983 | 1974.04 | 987.52 | 658.68 |
| 603 | Ac-LTF$r8F4gYWAQL$AAAAAa-NH₂ | 502 | | 2004.1 | 937.86 | 2005.11 | 1003.06 | 669.04 |
| 604 | Ac-LTF$r82mRYWAQL$AAAAAa-NH₂ | 503 | | 1984.13 | 958.58 | 1985.14 | 993.07 | 662.38 |
| 605 | Ac-LTF$r8ipKYWAQL$AAAAAa-NH₂ | 504 | | 1970.14 | 944.52 | 1971.15 | 986.08 | 657.72 |
| 606 | Ac-LTF$r8F4NH₂YWAQL$AAAAAa-NH₂ | 505 | | 1962.08 | 946 | 1963.09 | 982.05 | 655.03 |
| 607 | Ac-LTF$r8EYWAAL$AAAAAa-NH₂ | 506 | | 1872.02 | 959.32 | 1873.03 | 937.02 | 625.01 |
| 608 | Ac-LTF$r8EYWALL$AAAAAa-NH₂ | 507 | | 1914.07 | 980.88 | 1915.08 | 958.04 | 639.03 |
| 609 | Ac-LTF$r8EYWAAibL$AAAAAa-NH₂ | 508 | | 1886.03 | 970.61 | 1887.04 | 944.02 | 629.68 |
| 610 | Ac-LTF$r8EYWASL$AAAAAa-NH₂ | 509 | | 1888.01 | 980.51 | 1889.02 | 945.01 | 630.34 |
| 611 | Ac-LTF$r8EYWANL$AAAAAa-NH₂ | 510 | | 1915.02 | 1006.41 | 1916.03 | 958.52 | 639.35 |
| 612 | Ac-LTF$r8EYWACitL$AAAAAa-NH₂ | 511 | | 1958.07 | | 1959.08 | 980.04 | 653.7 |
| 613 | Ac-LTF$r8EYWAHL$AAAAAa-NH₂ | 512 | | 1938.04 | 966.24 | 1939.05 | 970.03 | 647.02 |
| 614 | Ac-LTF$r8EYWARL$AAAAAa-NH₂ | 513 | | 1957.08 | | 1958.09 | 979.55 | 653.37 |
| 615 | Ac-LTF$r8EpYWAQL$AAAAAa-NH₂ | 514 | | 2009.01 | | 2010.02 | 1005.51 | 670.68 |
| 616 | Cbm-LTF$r8EYWAQCba$SAA-NH₂ | 515 | | 1590.85 | | 1591.86 | 796.43 | 531.29 |
| 617 | Cbm-LTF$r8EYWAQL$AAAAAa-NH₂ | 516 | | 1930.04 | | 1931.05 | 966.03 | 644.35 |
| 618 | Ac-LTF$r8EYWAQL$SAAAAa-NH₂ | 517 | | 1945.04 | 1005.11 | 1946.05 | 973.53 | 649.35 |
| 619 | Ac-LTF$r8EYWAQL$AAAASa-NH₂ | 518 | | 1945.04 | 986.52 | 1946.05 | 973.53 | 649.35 |
| 620 | Ac-LTF$r8EYWAQL$SAAASa-NH₂ | 519 | | 1961.03 | 993.27 | 1962.04 | 981.52 | 654.68 |
| 621 | Ac-LTF$r8EYWAQTba$AAAAAa-NH₂ | 520 | | 1943.06 | 983.1 | 1944.07 | 972.54 | 648.69 |
| 622 | Ac-LTF$r8EYWAQAdm$AAAAAa-NH₂ | 521 | | 2007.09 | 990.31 | 2008.1 | 1004.55 | 670.04 |
| 623 | Ac-LTF$r8EYWAQCha$AAAAAa-NH₂ | 522 | | 1969.07 | 987.17 | 1970.08 | 985.54 | 657.36 |
| 624 | Ac-LTF$r8EYWAQhCha$AAAAAa-NH₂ | 523 | | 1983.09 | 1026.11 | 1984.1 | 992.55 | 662.04 |
| 625 | Ac-LTF$r8EYWAQF$AAAAAa-NH₂ | 524 | | 1963.02 | 957.01 | 1964.03 | 982.52 | 655.35 |
| 626 | Ac-LTF$r8EYWAQhF$AAAAAa-NH₂ | 525 | | 1977.04 | 1087.81 | 1978.05 | 989.53 | 660.02 |
| 627 | Ac-LTF$r8EYWAQL$AANleAAa-NH₂ | 526 | | 1971.09 | 933.45 | 1972.1 | 986.55 | 658.04 |
| 628 | Ac-LTF$r8EYWAQAdm$AANleAAa-NH₂ | 527 | | 2049.13 | 1017.97 | 2050.14 | 1025.57 | 684.05 |
| 629 | 4-FBz-BaLTF$r8EYWAQL$AAAAAa-NH₂ | 528 | | 2080.08 | | 2081.09 | 1041.05 | 694.37 |
| 630 | 4-FBz-BaLTF$r8EYWAQCba$SAA-NH₂ | 529 | | 1894.97 | | 1895.98 | 948.49 | 632.66 |
| 631 | Ac-LTF$r5EYWAQL$s8AAAAAa-NH₂ | 530 | | 1929.04 | 1072.68 | 1930.05 | 965.53 | 644.02 |
| 632 | Ac-LTF$r5EYWAQCba$s8SAA-NH₂ | 531 | | 1743.92 | 1107.79 | 1744.93 | 872.97 | 582.31 |
| 633 | Ac-LTF$r8EYWAQL$AAhhLAAa-NH₂ | 532 | | 1999.12 | | 2000.13 | 1000.57 | 667.38 |
| 634 | Ac-LTF$r8EYWAQL$AAAAAAAa-NH₂ | 533 | | 2071.11 | | 2072.12 | 1036.56 | 691.38 |
| 635 | Ac-LTF$r8EYWAQL$AAAAAAAAa-NH₂ | 534 | | 2142.15 | 778.1 | 2143.16 | 1072.08 | 715.06 |
| 636 | Ac-LTF$r8EYWAQL$AAAAAAAAAa-NH₂ | 535 | | 2213.19 | 870.53 | 2214.2 | 1107.6 | 738.74 |
| 637 | Ac-LTA$r8EYAAQCba$SAA-NH₂ | 536 | | 1552.85 | | 1553.86 | 777.43 | 518.62 |
| 638 | Ac-LTA$r8EYAAQL$AAAAAa-NH₂ | 537 | | 1737.97 | 779.45 | 1738.98 | 869.99 | 580.33 |
| 639 | Ac-LTF$r8EPmpWAQL$AAAAAa-NH₂ | 538 | | 2007.03 | 779.54 | 2008.04 | 1004.52 | 670.02 |
| 640 | Ac-LTF$r8EPmpWAQCba$SAA-NH₂ | 539 | | 1821.91 | 838.04 | 1822.92 | 911.96 | 608.31 |
| 641 | Ac-ATF$r8HYWAQL$S-NH₂ | 540 | | 1555.82 | 867.83 | 1556.83 | 778.92 | 519.61 |
| 642 | Ac-LTF$r8HAWAQL$S-NH₂ | 541 | | 1505.84 | 877.91 | 1506.85 | 753.93 | 502.95 |
| 643 | Ac-LTF$r8HYWAQA$S-NH₂ | 542 | | 1555.82 | 852.52 | 1556.83 | 778.92 | 519.61 |
| 644 | Ac-LTF$r8EYWAQCba$SA-NH₂ | 543 | | 1672.89 | 887.18 | 1673.9 | 837.45 | 558.64 |
| 645 | Ac-LTF$r8EYWAQL$SAA-NH₂ | 544 | | 1731.92 | 873.32 | 1732.93 | 866.97 | 578.31 |
| 646 | Ac-LTF$r8HYWAQCba$SAA-NH₂ | 545 | | 1751.94 | 873.05 | 1752.95 | 876.98 | 584.99 |
| 647 | Ac-LTF$r8SYWAQCba$SAA-NH₂ | 546 | | 1701.91 | 844.88 | 1702.92 | 851.96 | 568.31 |
| 648 | Ac-LTF$r8RYWAQCba$SAA-NH₂ | 547 | | 1770.98 | 865.58 | 1771.99 | 886.5 | 591.33 |
| 649 | Ac-LTF$r8KYWAQCba$SAA-NH₂ | 548 | | 1742.98 | 936.57 | 1743.99 | 872.5 | 582 |
| 650 | Ac-LTF$r8QYWAQCba$SAA-NH₂ | 549 | | 1742.94 | 930.93 | 1743.95 | 872.48 | 581.99 |
| 651 | Ac-LTF$r8EYWAACba$SAA-NH₂ | 550 | | 1686.9 | 1032.45 | 1687.91 | 844.46 | 563.31 |
| 652 | Ac-LTF$r8EYWAQCba$AAA-NH₂ | 551 | | 1727.93 | 895.46 | 1728.94 | 864.97 | 576.98 |
| 653 | Ac-LTF$r8EYWAQL$AAAAA-OH | 552 | | 1858.99 | 824.54 | 1860 | 930.5 | 620.67 |
| 654 | Ac-LTF$r8EYWAQL$AAAA-OH | 553 | | 1787.95 | 894.48 | 1788.96 | 894.98 | 596.99 |
| 655 | Ac-LTF$r8EYWAQL$AA-OH | 554 | | 1645.88 | 856 | 1646.89 | 823.95 | 549.63 |
| 656 | Ac-LTF$r8AF4bOH2WAQL$AAAAAa-NH₂ | 555 | | | | | | |
| 657 | Ac-LTF$r8AF4bOH2WAAL$AAAAAa-NH₂ | 556 | | | | | | |
| 658 | Ac-LTF$r8EF4bOH2WAQCba$SAA-NH₂ | 557 | | | | | | |
| 659 | Ac-LTF$r8ApYWAQL$AAAAAa-NH₂ | 558 | | | | | | |
| 660 | Ac-LTF$r8ApYWAAL$AAAAAa-NH₂ | 559 | | | | | | |
| 661 | Ac-LTF$r8EpYWAQCba$SAA-NH₂ | 560 | | | | | | |
| 662 | Ac-LTF$rda6AYWAQL$da5AAAAAa-NH₂ | 561 | | 1974.06 | 934.44 | | | |
| 663 | Ac-LTF$rda6EYWAQCba$da5SAA-NH₂ | 562 | | 1846.95 | 870.52 | | 869.94 | |
| 664 | Ac-LTF$rda6EYWAQL$da5AAAAAa-NH₂ | 563 | | | | | | |
| 665 | Ac-LTF$ra9EYWAQL$a6AAAAAa-NH₂ | 564 | | | 936.57 | | 935.51 | |
| 666 | Ac-LTF$ra9EYWAQL$a6AAAAAa-NH₂ | 565 | | | | | | |
| 667 | Ac-LTF$ra9EYWAQCba$a6SAA-NH₂ | 566 | | | | | | |
| 668 | Ac-LTA$ra9EYWAQCba$a6SAA-NH₂ | 567 | | | | | | |
| 669 | 5-FAM-BaLTF$ra9EYWAQCba$a6SAA-NH₂ | 568 | | | | | | |
| 670 | 5-FAM-BaLTF$r8EYWAQL$AAAAAa-NH₂ | 569 | | 2316.11 | | | | |
| 671 | 5-FAM-BaLTF$/r8EYWAQL$/AAAAAa-NH₂ | 570 | | 2344.15 | | | | |
| 672 | 5-FAM-BaLTA$r8EYWAQL$AAAAAa-NH₂ | 571 | | 2240.08 | | | | |
| 673 | 5-FAM-BaLTF$r8AYWAQL$AAAAAa-NH₂ | 572 | | 2258.11 | | | | |
| 674 | 5-FAM-BaATF$r8EYWAQL$AAAAAa-NH₂ | 573 | | 2274.07 | | | | |
| 675 | 5-FAM-BaLAF$r8EYWAQL$AAAAAa-NH₂ | 574 | | 2286.1 | | | | |
| 676 | 5-FAM-BaLTF$r8EAWAQL$AAAAAa-NH₂ | 575 | | 2224.09 | | | | |
| 677 | 5-FAM-BaLTF$r8EYAAQL$AAAAAa-NH₂ | 576 | | 2201.07 | | | | |
| 678 | 5-FAM-BaLTA$r8EYAAQL$AAAAAa-NH₂ | 577 | | 2125.04 | | | | |
| 679 | 5-FAM-BaLTF$r8EYWAAL$AAAAAa-NH₂ | 578 | | 2259.09 | | | | |
| 680 | 5-FAM-BaLTF$r8EYWAQA$AAAAAa-NH₂ | 579 | | 2274.07 | | | | |
| 681 | 5-FAM-BaLTF$/r8EYWAQCba$/SAA-NH₂ | 580 | | 2159.03 | | | | |
| 682 | 5-FAM-BaLTA$r8EYWAQCba$SAA-NH₂ | 581 | | 2054.97 | | | | |
| 683 | 5-FAM-BaLTF$r8EYAAQCba$SAA-NH₂ | 582 | | 2015.96 | | | | |
| 684 | 5-FAM-BaLTA$r8EYAAQCba$SAA-NH₂ | 583 | | 1939.92 | | | | |
| 685 | 5-FAM-BaQSQQTF$r8NLWRLL$QN-NH₂ | 584 | | 2495.23 | | | | |
| 686 | 5-TAMRA-BaLTF$r8EYWAQCba$SAA-NH₂ | 585 | | 2186.1 | | | | |
| 687 | 5-TAMRA-BaLTA$r8EYWAQCba$SAA-NH₂ | 586 | | 2110.07 | | | | |
| 688 | 5-TAMRA-BaLTF$r8EYAAQCba$SAA-NH₂ | 587 | | 2071.06 | | | | |
| 689 | 5-TAMRA-BaLTA$r8EYAAQCba$SAA-NH₂ | 588 | | 1995.03 | | | | |
| 690 | 5-TAMRA-BaLTF$/r8EYWAQCba$/SAA-NH₂ | 589 | | 2214.13 | | | | |
| 691 | 5-TAMRA-BaLTF$r8EYWAQL$AAAAAa-NH₂ | 590 | | 2371.22 | | | | |
| 692 | 5-TAMRA-BaLTA$r8EYWAQL$AAAAAa-NH₂ | 591 | | 2295.19 | | | | |
| 693 | 5-TAMRA-BaLTF$/r8EYWAQL$/AAAAAa-NH₂ | 592 | | 2399.25 | | | | |
| 694 | Ac-LTF$r8EYWCou7QCba$SAA-OH | 593 | | 1947.93 | | | | |
| 695 | Ac-LTF$r8EYWCou7QCba$S-OH | 594 | | 1805.86 | | | | |
| 696 | Ac-LTA$r8EYWCou7QCba$SAA-NH₂ | 595 | | 1870.91 | | | | |
| 697 | Ac-LTF$r8EYACou7QCba$SAA-NH₂ | 596 | | 1831.9 | | | | |
| 698 | Ac-LTA$r8EYACou7QCba$SAA-NH₂ | 597 | | 1755.87 | | | | |
| 699 | Ac-LTF$/r8EYWCou7QCba$/SAA-NH₂ | 598 | | 1974.98 | | | | |
| 700 | Ac-LTF$r8EYWCou7QL$AAAAAa-NH₂ | 599 | | 2132.06 | | | | |
| 701 | Ac-LTF$/r8EYWCou7QL$/AAAAAa-NH₂ | 600 | | 2160.09 | | | | |
| 702 | Ac-LTF$r8EYWCou7QL$AAAAA-OH | 601 | | 2062.01 | | | | |
| 703 | Ac-LTF$r8EYWCou7QL$AAAA-OH | 602 | | 1990.97 | | | | |
| 704 | Ac-LTF$r8EYWCou7QL$AAA-OH | 603 | | 1919.94 | | | | |
| 705 | Ac-LTF$r8EYWCou7QL$AA-OH | 604 | | 1848.9 | | | | |
| 706 | Ac-LTF$r8EYWCou7QL$A-OH | 605 | | 1777.86 | | | | |
| 707 | Ac-LTF$r8EYWAQL$AAAASa-NH₂ | 606 | iso2 | | 974.4 | | 973.53 | |
| 708 | Ac-LTF$r8AYWAAL$AAAAAa-NH₂ | 607 | iso2 | 1814.01 | 908.82 | 1815.02 | 908.01 | 605.68 |
| 709 | Biotin-BaLTF$r8EYWAQL$AAAAAa-NH₂ | 608 | | 2184.14 | 1093.64 | 2185.15 | 1093.08 | 729.05 |
| 710 | Ac-LTF$r8HAWAQL$S-NH₂ | 609 | iso2 | 1505.84 | 754.43 | 1506.85 | 753.93 | 502.95 |
| 711 | Ac-LTF$r8EYWAQCba$SA-NH₂ | 610 | iso2 | 1672.89 | 838.05 | 1673.9 | 837.45 | 558.64 |
| 712 | Ac-LTF$r8HYWAQCba$SAA-NH₂ | 611 | iso2 | 1751.94 | 877.55 | 1752.95 | 876.98 | 584.99 |
| 713 | Ac-LTF$r8SYWAQCba$SAA-NH₂ | 612 | iso2 | 1701.91 | 852.48 | 1702.92 | 851.96 | 568.31 |
| 714 | Ac-LTF$r8RYWAQCba$SAA-NH₂ | 613 | iso2 | 1770.98 | 887.45 | 1771.99 | 886.5 | 591.33 |
| 715 | Ac-LTF$r8KYWAQCba$SAA-NH₂ | 614 | iso2 | 1742.98 | 872.92 | 1743.99 | 872.5 | 582 |
| 716 | Ac-LTF$r8EYWAQCba$AAA-NH₂ | 615 | iso2 | 1727.93 | 865.71 | 1728.94 | 864.97 | 576.98 |
| 717 | Ac-LTF$r8EYWAQL$AAAAAaBaC-NH₂ | 616 | | 2103.09 | 1053.12 | 2104.1 | 1052.55 | 702.04 |
| 718 | Ac-LTF$r8EYWAQL$AAAAAadPeg4C-NH₂ | 617 | | 2279.19 | 1141.46 | 2280.2 | 1140.6 | 760.74 |
| 719 | Ac-LTA$r8AYWAAL$AAAAAa-NH₂ | 618 | | 1737.98 | 870.43 | 1738.99 | 870 | 580.33 |
| 720 | Ac-LTF$r8AYAAAL$AAAAAa-NH₂ | 619 | | 1698.97 | 851 | 1699.98 | 850.49 | 567.33 |
| 721 | 5-FAM-BaLTF$r8AYWAAL$AAAAAa-NH₂ | 620 | | 2201.09 | 1101.87 | 2202.1 | 1101.55 | 734.7 |
| 722 | Ac-LTA$r8AYWAQL$AAAAAa-NH₂ | 621 | | 1795 | 898.92 | 1796.01 | 898.51 | 599.34 |
| 723 | Ac-LTF$r8AYAAQL$AAAAAa-NH₂ | 622 | | 1755.99 | 879.49 | 1757 | 879 | 586.34 |
| 724 | Ac-LTF$rda6AYWAAL$da5AAAAAa-NH₂ | 623 | | 1807.97 | | 1808.98 | 904.99 | 603.66 |
| 725 | FITC-BaLTF$r8EYWAQL$AAAAAa-NH₂ | 624 | | 2347.1 | 1174.49 | 2348.11 | 1174.56 | 783.37 |
| 726 | FITC-BaLTF$r8EYWAQCba$SAA-NH₂ | 625 | | 2161.99 | 1082.35 | 2163 | 1082 | 721.67 |
| 733 | Ac-LTF$r8EYWAQL$EAAAAa-NH₂ | 626 | | 1987.05 | 995.03 | 1988.06 | 994.53 | 663.36 |
| 734 | Ac-LTF$r8AYWAQL$EAAAAa-NH₂ | 627 | | 1929.04 | 966.35 | 1930.05 | 965.53 | 644.02 |
| 735 | Ac-LTF$r8EYWAQL$AAAAAaBaKbio-NH₂ | 628 | | 2354.25 | 1178.47 | 2355.26 | 1178.13 | 785.76 |
| 736 | Ac-LTF$r8AYWAAL$AAAAAa-NH₂ | 629 | | 1814.01 | 908.45 | 1815.02 | 908.01 | 605.68 |
| 737 | Ac-LTF$r8AYAAAL$AAAAAa-NH₂ | 630 | iso2 | 1698.97 | 850.91 | 1699.98 | 850.49 | 567.33 |
| 738 | Ac-LTF$r8AYAAQL$AAAAAa-NH₂ | 631 | iso2 | 1755.99 | 879.4 | 1757 | 879 | 586.34 |
| 739 | Ac-LTF$r8EYWAQL$EAAAAa-NH₂ | 632 | iso2 | 1987.05 | 995.21 | 1988.06 | 994.53 | 663.36 |
| 740 | Ac-LTF$r8AYWAQL$EAAAAa-NH₂ | 633 | iso2 | 1929.04 | 966.08 | 1930.05 | 965.53 | 644.02 |
| 741 | Ac-LTF$r8EYWAQCba$SAAAAa-NH₂ | 634 | | 1957.04 | 980.04 | 1958.05 | 979.53 | 653.35 |
| 742 | Ac-LTF$r8EYWAQLStAAA$r5AA-NH₂ | 635 | | 2023.12 | 1012.83 | 2024.13 | 1012.57 | 675.38 |
| 743 | Ac-LTF$r8EYWAQL$A$AAA$A-NH₂ | 636 | | 2108.17 | 1055.44 | 2109.18 | 1055.09 | 703.73 |
| 744 | Ac-LTF$r8EYWAQL$AA$AAA$A-NH₂ | 637 | | 2179.21 | 1090.77 | 2180.22 | 1090.61 | 727.41 |
| 745 | Ac-LTF$r8EYWAQL$AAA$AAA$A-NH₂ | 638 | | 2250.25 | 1126.69 | 2251.26 | 1126.13 | 751.09 |
| 746 | Ac-AAALTF$r8EYWAQL$AAA-OH | 639 | | 1930.02 | | 1931.03 | 966.02 | 644.35 |
| 747 | Ac-AAALTF$r8EYWAQL$AAA-NH₂ | 640 | | 1929.04 | 965.85 | 1930.05 | 965.53 | 644.02 |
| 748 | Ac-AAAALTF$r8EYWAQL$AAA-NH₂ | 641 | | 2000.08 | 1001.4 | 2001.09 | 1001.05 | 667.7 |
| 749 | Ac-AAAAALTF$r8EYWAQL$AAA-NH₂ | 642 | | 2071.11 | 1037.13 | 2072.12 | 1036.56 | 691.38 |
| 750 | Ac-AAAAAALTF$r8EYWAQL$AAA-NH₂ | 643 | | 2142.15 | | 2143.16 | 1072.08 | 715.06 |
| 751 | Ac-LTF$rda6EYWAQCba$da6SAA-NH₂ | 644 | iso2 | 1751.89 | 877.36 | 1752.9 | 876.95 | 584.97 |
| 752 | Ac-t$r5wya$r5f4CF3ekllr-NH₂ | 645 | | | 844.25 | | | |
| 753 | Ac-tawy$r5nf4CF3e$r5llr-NH₂ | 646 | | | 837.03 | | | |
| 754 | Ac-tawya$r5f4CF3ek$r51r-NH₂ | 647 | | | 822.97 | | | |
| 755 | Ac-tawyanf4CF3e$r511r$r5a-NH₂ | 648 | | | 908.35 | | | |
| 756 | Ac-t$s8wyanf4CF3e$r511r-NH₂ | 649 | | | 858.03 | | | |
| 757 | Ac-tawy$s8nf4CF3ekll$r5a-NH₂ | 650 | | | 879.86 | | | |
| 758 | Ac-tawya$s8f4CF3ekllr$r5a-NH₂ | 651 | | | 936.38 | | | |
| 759 | Ac-tawy$s8naekll$r5a-NH₂ | 652 | | | 844.25 | | | |
| 760 | 5-FAM-Batawy$s8nf4CF3ekll$r5a-NH₂ | 653 | | | | | | |
| 761 | 5-FAM-Batawy$s8naekll$r5a-NH₂ | 654 | | | | | | |
| 762 | Ac-tawy$s8nf4CF3eall$r5a-NH₂ | 655 | | | | | | |
| 763 | Ac-tawy$s8nf4CF3ekll$r5aaaaa-NH₂ | 656 | | | | | | |
| 764 | Ac-tawy$s8nf4CF3eall$r5aaaaa-NH₂ | 657 | | | | | | |

[0540] TABLE 1a shows a selection of peptidomimetic macrocycles.

TABLE 1a

| | | SEQ | | Exact | Found | Calc | Calc | Calc |
|---|---|---|---|---|---|---|---|---|
| SP | Sequence | ID NO: | Isomer | Mass | Mass | (M + 1)/1 | (M + 2)/2 | (M + 3)/3 |
| 244 | Ac-LTF$r8EF4coohWAQCba$SANleA-NH₂ | 658 | | 1885 | 943.59 | 1886.01 | 943.51 | 629.34 |
| 331 | Ac-LTF$r8EYWAQL$AAAAAa-NH₂ | 659 | iso2 | 1929.04 | 966.08 | 1930.05 | 965.53 | 644.02 |
| 555 | Ac-LTF$r8EY6clWAQL$AAAAAa-NH₂ | 660 | | 1963 | 983.28 | 1964.01 | 982.51 | 655.34 |
| 557 | Ac-AAALTF$r8EYWAQL$AAAAAa-NH₂ | 661 | | 2142.15 | 1072.83 | 2143.16 | 1072.08 | 715.06 |
| 558 | Ac-LTF34F2$r8EYWAQL$AAAAAa-NH₂ | 662 | | 1965.02 | 984.3 | 1966.03 | 983.52 | 656.01 |
| 562 | Ac-LTF$r8EYWAQL$AAibAAAa-NH₂ | 663 | | 1943.06 | 973.11 | 1944.07 | 972.54 | 648.69 |
| 564 | Ac-LTF$r8EYWAQL$AAAAibAa-NH₂ | 664 | | 1943.06 | 973.48 | 1944.07 | 972.54 | 648.69 |
| 566 | Ac-LTF$r8EYWAQL$AAAAAiba-NH₂ | 665 | iso2 | 1943.06 | 973.38 | 1944.07 | 972.54 | 648.69 |
| 567 | Ac-LTF$r8EYWAQL$AAAAAAib-NH₂ | 666 | | 1943.06 | 973.01 | 1944.07 | 972.54 | 648.69 |
| 572 | Ac-LTF$r8EYWAQL$AAAAaa-NH₂ | 667 | | 1929.04 | 966.35 | 1930.05 | 965.53 | 644.02 |
| 573 | Ac-LTF$r8EYWAQL$AAAAAA-NH₂ | 668 | | 1929.04 | 966.35 | 1930.05 | 965.53 | 644.02 |
| 578 | Ac-LTF$r8EYWAQL$AAAAASar-NH₂ | 669 | | 1929.04 | 966.08 | 1930.05 | 965.53 | 644.02 |
| 551 | Ac-LTF$r8EYWAQL$AAAAAa-OH | 670 | iso2 | 1930.02 | 965.89 | 1931.03 | 966.02 | 644.35 |
| 662 | Ac-LTF$rda6AYWAQL$da5AAAAAa-NH₂ | 671 | | 1974.06 | 934.44 | | 933.49 | |
| 367 | 5-FAM-BaLTF$r8EYWAQCba$SAA-NH₂ | 672 | | 2131 | 1067.09 | 2132.01 | 1066.51 | 711.34 |
| 349 | Ac-LTF$r8EF4coohWAQCba$AAAAAa-NH₂ | 673 | iso2 | 1969.04 | 986.06 | 1970.05 | 985.53 | 657.35 |
| 347 | Ac-LTF$r8EYWAQCba$AAAAAa-NH₂ | 674 | iso2 | 1941.04 | 972.55 | 1942.05 | 971.53 | 648.02 |

[0541] TABLE 1b shows a further selection of peptidomimetic macrocycles.

TABLE 1b

| | | SEQ | | Exact | Found | Calc | Calc | Calc |
|---|---|---|---|---|---|---|---|---|
| SP | Sequence | ID NO: | Isomer | Mass | Mass | (M + 1)/1 | (M + 2)/2 | (M+ 3)/3 |
| 581 | Ac-TF$r8EYWAQL$AAAAAa-NH₂ | 675 | z | 1815.96 | 929.85 | 1816.97 | 908.99 | 606.33 |
| 582 | Ac-F$r8EYWAQL$AAAAAa-NH₂ | 676 | | 1714.91 | 930.92 | 1715.92 | 858.46 | 572.64 |
| 583 | Ac-LVF$r8EYWAQL$AAAAAa-NH₂ | 677 | | 1927.06 | 895.12 | 1928.07 | 964.54 | 643.36 |
| 584 | Ac-AAF$r8EYWAQL$AAAAAa-NH₂ | 678 | | 1856.98 | 859.51 | 1857.99 | 929.5 | 620 |
| 585 | Ac-LTF$r8EYWAQL$AAAAa-NH₂ | 679 | | 1858 | 824.08 | 1859.01 | 930.01 | 620.34 |
| 586 | Ac-LTF$r8EYWAQL$AAAa-NH₂ | 680 | | 1786.97 | 788.56 | 1787.98 | 894.49 | 596.66 |
| 587 | Ac-LTF$r8EYWAQL$AAa-NH₂ | 681 | | 1715.93 | 1138.57 | 1716.94 | 858.97 | 572.98 |
| 588 | Ac-LTF$r8EYWAQL$Aa-NH₂ | 682 | | 1644.89 | 1144.98 | 1645.9 | 823.45 | 549.3 |
| 589 | Ac-LTF$r8EYWAQL$a-NH₂ | 683 | | 1573.85 | 1113.71 | 1574.86 | 787.93 | 525.62 |

[0542] In the sequences shown above and elsewhere, the following abbreviations are used: “Nle” represents norleucine, “Aib” represents 2-aminoisobutyric acid, “Ac” represents acetyl, and “Pr” represents propionyl. Amino acids represented as “$” are alpha-Me S5-pentenyl-alanine olefin amino acids connected by an all-carbon crosslinker comprising one double bond. Amino acids represented as “$r5” are alpha-Me R₅-pentenyl-alanine olefin amino acids connected by an all-carbon comprising one double bond. Amino acids represented as “$s8” are alpha-Me S8-octenyl-alanine olefin amino acids connected by an all-carbon crosslinker comprising one double bond. Amino acids represented as “$r8” are alpha-Me R8-octenyl-alanine olefin amino acids connected by an all-carbon crosslinker comprising one double bond. “Ahx” represents an aminocyclohexyl linker.

[0543] The crosslinkers are linear all-carbon crosslinker comprising eight or eleven carbon atoms between the alpha carbons of each amino acid. Amino acids represented as “$/” are alpha-Me S5-pentenyl-alanine olefin amino acids that are not connected by any crosslinker. Amino acids represented as “$/r5” are alpha-Me R5-pentenyl-alanine olefin amino acids that are not connected by any crosslinker. Amino acids represented as “$/s8” are alpha-Me S8-octenyl-alanine olefin amino acids that are not connected by any crosslinker. Amino acids represented as “$/r8” are alpha-Me R8-octenyl-alanine olefin amino acids that are not connected by any crosslinker.

[0544] Amino acids represented as “Amw” are alpha-Me tryptophan amino acids. Amino acids represented as “Aml” are alpha-Me leucine amino acids. Amino acids represented as “Amf” are alpha-Me phenylalanine amino acids. Amino acids represented as “2ff” are 2-fluoro-phenylalanine amino acids. Amino acids represented as “3ff” are 3-fluoro-phenylalanine amino acids. Amino acids represented as “St” are amino acids comprising two pentenyl-alanine olefin side chains, each of which is crosslinked to another amino acid as indicated. Amino acids represented as “St//” are amino acids comprising two pentenyl-alanine olefin side chains that are not crosslinked. Amino acids represented as “% St” are amino acids comprising two pentenyl-alanine olefin side chains, each of which is crosslinked to another amino acid as indicated via fully saturated hydrocarbon crosslinks. Amino acids represented as “Ba” are beta-alanine. The lower-case character “e” or “z” within the designation of a crosslinked amino acid (e.g. “$er8” or “$zr8”) represents the configuration of the double bond (E or Z, respectively). In other contexts, lower-case letters such as “a” or “f” represent D amino acids (e.g. D-alanine, or D-phenylalanine, respectively).

[0545] Amino acids designated as “NmW” represent N-methyltryptophan. Amino acids designated as “NmY” represent N-methyltyrosine. Amino acids designated as “NmA” represent N-methylalanine. “Kbio” represents a biotin group attached to the side chain amino group of a lysine residue. Amino acids designated as “Sar” represent sarcosine. Amino acids designated as “Cha” represent cyclohexyl alanine. Amino acids designated as “Cpg” represent cyclopentyl glycine. Amino acids designated as “Chg” represent cyclohexyl glycine. Amino acids designated as “Cba” represent cyclobutyl alanine. Amino acids designated as “F41” represent 4-iodo phenylalanine. “7L” represents N15 isotopic leucine. Amino acids designated as “F3Cl” represent 3-chloro phenylalanine. Amino acids designated as “F4cooh” represent 4-carboxy phenylalanine. Amino acids designated as “F34F2” represent 3,4-difluoro phenylalanine. Amino acids designated as “6clW” represent 6-chloro tryptophan. Amino acids designated as “$rda6” represent alpha-Me R6-hexynyl-alanine alkynyl amino acids, crosslinked via a dialkyne bond to a second alkynyl amino acid.

[0546] Amino acids designated as “$da5” represent alpha-Me S5-pentynyl-alanine alkynyl amino acids, wherein the alkyne forms one half of a dialkyne bond with a second alkynyl amino acid. Amino acids designated as “$ra9” represent alpha-Me R9-nonynyl-alanine alkynyl amino acids, crosslinked via an alkyne metathesis reaction with a second alkynyl amino acid. Amino acids designated as “$a6” represent alpha-Me S6-hexynyl-alanine alkynyl amino acids, crosslinked via an alkyne metathesis reaction with a second alkynyl amino acid. The designation “iso1” or “iso2” indicates that the peptidomimetic macrocycle is a single isomer.

[0547] Amino acids designated as “Cit” represent citrulline. Amino acids designated as “Cou4”, “Cou6”, “Cou7” and “Cou8”, respectively, represent the following structures:

[chemical structure]

[chemical structure]

[0548] In some embodiments, a peptidomimetic macrocycle is obtained in more than one isomer, for example due to the configuration of a double bond within the structure of the crosslinker (E vs Z). Such isomers can or cannot be separable by conventional chromatographic methods. In some embodiments, one isomer has improved biological properties relative to the other isomer. In one embodiment, an E crosslinker olefin isomer of a peptidomimetic macrocycle has better solubility, better target affinity, better in vivo or in vitro efficacy, higher helicity, or improved cell permeability relative to its Z counterpart. In another embodiment, a Z crosslinker olefin isomer of a peptidomimetic macrocycle has better solubility, better target affinity, better in vivo or in vitro efficacy, higher helicity, or improved cell permeability relative to its E counterpart.

[0549] TABLE 1c shows non-limiting examples of peptidomimetic macrocycles.

TABLE 1c

| SP | SEQ ID | |
|---|---|---|
| # | NO: | Structure |
| 154 | 154 | [chemical structure] |
| 115 | 115 | [chemical structure] |
| 114 | 114 | [chemical structure] |
| 99 | 99 | [chemical structure] |
| 388 | 388 | [chemical structure] |
| 331 | 331 | [chemical structure] |
| 445 | 445 | [chemical structure] |
| 351 | 351 | [chemical structure] |
| 71 | 71 | [chemical structure] |
| 69 | 69 | [chemical structure] |
| 7 | 7 | [chemical structure] |
| 160 | 160 | [chemical structure] |
| 315 | 315 | [chemical structure] |
| 249 | 249 | [chemical structure] |
| 437 | 437 | [chemical structure] |
| 349 | 349 | [chemical structure] |
| 555 | 455 | [chemical structure] |
| 557 | 457 | [chemical structure] |
| 558 | 458 | [chemical structure] |
| 367 | 367 | [chemical structure] |
| 562 | 462 | [chemical structure] |
| 564 | 464 | [chemical structure] |
| 566 | 466 | [chemical structure] |
| 567 | 467 | [chemical structure] |
| 572 | 472 | [chemical structure] |
| 573 | 473 | [chemical structure] |
| 578 | 478 | [chemical structure] |
| 664 | 563 | [chemical structure] |
| 662 | 563 | [chemical structure] |
| | 684 | [chemical structure] |

[0550] In some embodiments, peptidomimetic macrocycles include peptidomimetic macrocycles shown in TABLE 2a:

TABLE 2a

| Sequence | SEQ ID NO: |
|---|---|
| L$r5QETFSD$s8WKLLPEN | 685 |
| LSQ$r5TFSDLW$s8LLPEN | 686 |
| LSQE$r5FSDLWK$s8LPEN | 687 |
| LSQET$r5SDLWKL$s8PEN | 688 |
| LSQETF$r5DLWKLL$s8EN | 689 |
| LXQETFS$r5LWKLLP$s8N | 690 |
| LSQETFSD$r5WKLLPE$s8 | 691 |
| LSQQTF$r5DLWKLL$s8EN | 692 |
| LSQETF$r5DLWKLL$s8QN | 693 |
| LSQQTF$r5DLWKLL$s8QN | 694 |
| LSQETF$r5NLWKLL$s8QN | 695 |
| LSQQTF$r5NLWKLL$s8QN | 696 |
| LSQQTF$r5NLWRLL$s8QN | 697 |
| QSQQTF$r5NLWKLL$s8QN | 698 |
| QSQQTF$r5NLWRLL$s8QN | 699 |
| QSQQTA$r5NLWRLL$s8QN | 700 |
| L$r8QETFSD$WKLLPEN | 701 |
| LSQ$r8TFSDLW$LLPEN | 702 |
| LSQE$r8FSDLWK$LPEN | 703 |
| LSQET$r8SDLWKL$PEN | 704 |
| LSQETF$r8DLWKLL$EN | 705 |
| LXQETFS$r8LWKLLP$N | 706 |
| LSQETFSD$r8WKLLPE$ | 707 |
| LSQQTF$r8DLWKLL$EN | 708 |
| LSQETF$r8DLWKLL$QN | 709 |
| LSQQTF$r8DLWKLL$QN | 710 |
| LSQETF$r8NLWKLL$QN | 711 |
| LSQQTF$r8NLWKLL$QN | 712 |
| LSQQTF$r8NLWRLL$QN | 713 |
| QSQQTF$r8NLWKLL$QN | 714 |
| QSQQTF$r8NLWRLL$QN | 715 |
| QSQQTA$r8NLWRLL$QN | 716 |
| QSQQTF$r8NLWRKK$QN | 717 |
| QQTF$r8DLWRLL$EN | 718 |
| QQTF$r8DLWRLL$ | 719 |
| LSQQTF$DLW$LL | 720 |
| QQTF$DLW$LL | 721 |
| QQTA$r8DLWRLL$EN | 722 |
| QSQQTF$r5NLWRLL$s8QN (dihydroxylated olefin) | 723 |
| QSQQTA$r5NLWRLL$s8QN (dihydroxylated olefin) | 724 |
| QSQQTF$r8DLWRLL$QN | 725 |
| QTF$r8NLWRLL$ | 726 |
| QSQQTF$NLW$LLPQN | 727 |
| QS$QTF$NLWRLLPQN | 728 |
| $TFS$LWKLL | 729 |
| ETF$DLW$LL | 730 |
| QTF$NLW$LL | 731 |
| $SQE$FSNLWKLL | 732 |

[0551] In TABLE 2a, the peptides can comprise an N-terminal capping group such as acetyl or an additional linker such as beta-alanine between the capping group and the start of the peptide sequence.

[0552] In some embodiments, peptidomimetic macrocycles include those shown in TABLE 2b.

TABLE 2b

| | | | | | Observed mass |
|---|---|---|---|---|---|
| SP | Sequence | SEQ ID NO: | Exact Mass | M + 2 | (m/e) |
| 1 | Ac-LSQETF$r8DLWKLL$EN-NH₂ | 733 | 2068.13 | 1035.07 | 1035.36 |
| 2 | Ac-LSQETF$r8NLWKLL$QN-NH₂ | 734 | 2066.16 | 1034.08 | 1034.31 |
| 3 | Ac-LSQQTF$r8NLWRLL$QN-NH₂ | 735 | 2093.18 | 1047.59 | 1047.73 |
| 4 | Ac-QSQQTF$r8NLWKLL$QN-NH₂ | 736 | 2080.15 | 1041.08 | 1041.31 |
| 5 | Ac-QSQQTF$r8NLWRLL$QN-NH₂ | 737 | 2108.15 | 1055.08 | 1055.32 |
| 6 | Ac-QSQQTA$r8NLWRLL$QN-NH₂ | 738 | 2032.12 | 1017.06 | 1017.24 |
| 7 | Ac-QAibQQTF$r8NLWRLL$QN-NH₂ | 739 | 2106.17 | 1054.09 | 1054.34 |
| 8 | Ac-QSQQTFSNLWRLLPQN-NH₂ | 740 | 2000.02 | 1001.01 | 1001.26 |
| 9 | Ac-QSQQTF$/r8NLWRLL$/QN-NH₂ | 741 | 2136.18 | 1069.09 | 1069.37 |
| 10 | Ac-QSQAibTF$r8NLWRLL$QN-NH₂ | 742 | 2065.15 | 1033.58 | 1033.71 |
| 11 | Ac-QSQQTF$r8NLWRLL$AN-NH₂ | 743 | 2051.13 | 1026.57 | 1026.70 |
| 12 | Ac-ASQQTF$r8NLWRLL$QN-NH₂ | 744 | 2051.13 | 1026.57 | 1026.90 |
| 13 | Ac-QSQQTF$r8ALWRLL$QN-NH₂ | 745 | 2065.15 | 1033.58 | 1033.41 |
| 14 | Ac-QSQETF$r8NLWRLL$QN-NH₂ | 746 | 2109.14 | 1055.57 | 1055.70 |
| 15 | Ac-RSQQTF$r8NLWRLL$QN-NH₂ | 747 | 2136.20 | 1069.10 | 1069.17 |
| 16 | Ac-RSQQTF$r8NLWRLL$EN-NH₂ | 748 | 2137.18 | 1069.59 | 1069.75 |
| 17 | Ac-LSQETFSDLWKLLPEN-NH₂ | 749 | 1959.99 | 981.00 | 981.24 |
| 18 | Ac-QSQ$TFS$LWRLLPQN-NH₂ | 750 | 2008.09 | 1005.05 | 1004.97 |
| 19 | Ac-QSQQ$FSN$WRLLPQN-NH₂ | 751 | 2036.06 | 1019.03 | 1018.86 |
| 20 | Ac-QSQQT$SNL$RLLPQN-NH₂ | 752 | 1917.04 | 959.52 | 959.32 |
| 21 | Ac-QSQQTF$NLW$LLPQN-NH₂ | 753 | 2007.06 | 1004.53 | 1004.97 |
| 22 | Ac-RTQATF$r8NQWAibANle$TNAibTR-NH₂ | 754 | 2310.26 | 1156.13 | 1156.52 |
| 23 | Ac-QSQQTF$r8NLWRLL$RN-NH₂ | 755 | 2136.20 | 1069.10 | 1068.94 |
| 24 | Ac-QSQRTF$r8NLWRLL$QN-NH₂ | 756 | 2136.20 | 1069.10 | 1068.94 |
| 25 | Ac-QSQQTF$r8NNleWRLL$QN-NH₂ | 757 | 2108.15 | 1055.08 | 1055.44 |
| 26 | Ac-QSQQTF$r8NLWRNleL$QN-NH₂ | 758 | 2108.15 | 1055.08 | 1055.84 |
| 27 | Ac-QSQQTF$r8NLWRLNle$QN-NH₂ | 759 | 2108.15 | 1055.08 | 1055.12 |
| 28 | Ac-QSQQTY$r8NLWRLL$QN-NH₂ | 760 | 2124.15 | 1063.08 | 1062.92 |
| 29 | Ac-RAibQQTF$r8NLWRLL$QN-NH₂ | 761 | 2134.22 | 1068.11 | 1068.65 |
| 30 | Ac-MPRFMDYWEGLN-NH₂ | 762 | 1598.70 | 800.35 | 800.45 |
| 31 | Ac-RSQQRF$r8NLWRLL$QN-NH₂ | 763 | 2191.25 | 1096.63 | 1096.83 |
| 32 | Ac-QSQQRF$r8NLWRLL$QN-NH₂ | 764 | 2163.21 | 1082.61 | 1082.87 |
| 33 | Ac-RAibQQRF$r8NLWRLL$QN-NH₂ | 765 | 2189.27 | 1095.64 | 1096.37 |
| 34 | Ac-RSQQRF$r8NFWRLL$QN-NH₂ | 766 | 2225.23 | 1113.62 | 1114.37 |
| 35 | Ac-RSQQRF$r8NYWRLL$QN-NH₂ | 767 | 2241.23 | 1121.62 | 1122.37 |
| 36 | Ac-RSQQTF$r8NLWQLL$QN-NH₂ | 768 | 2108.15 | 1055.08 | 1055.29 |
| 37 | Ac-QSQQTF$r8NLWQAmlL$QN-NH₂ | 769 | 2094.13 | 1048.07 | 1048.32 |
| 38 | Ac-QSQQTF$r8NAmlWRLL$QN-NH₂ | 770 | 2122.17 | 1062.09 | 1062.35 |
| 39 | Ac-NlePRF$r8DYWEGL$QN-NH₂ | 771 | 1869.98 | 935.99 | 936.20 |
| 40 | Ac-NlePRF$r8NYWRLL$QN-NH₂ | 772 | 1952.12 | 977.06 | 977.35 |
| 41 | Ac-RF$r8NLWRLL$Q-NH₂ | 773 | 1577.96 | 789.98 | 790.18 |
| 42 | Ac-QSQQTF$r8N2ffWRLL$QN-NH₂ | 774 | 2160.13 | 1081.07 | 1081.40 |
| 43 | Ac-QSQQTF$r8N3ffWRLL$QN-NH₂ | 775 | 2160.13 | 1081.07 | 1081.34 |
| 44 | Ac-QSQQTF#r8NLWRLL#QN-NH₂ | 776 | 2080.12 | 1041.06 | 1041.34 |
| 45 | Ac-RSQQTA$r8NLWRLL$QN-NH₂ | 777 | 2060.16 | 1031.08 | 1031.38 |
| 46 | Ac-QSQQTF % r8NLWRLL % QN-NH₂ | 778 | 2110.17 | 1056.09 | 1056.55 |
| 47 | HepQSQ$TFSNLWRLLPQN-NH₂ | 779 | 2051.10 | 1026.55 | 1026.82 |
| 48 | HepQSQ$TF$r8NLWRLL$QN-NH₂ | 780 | 2159.23 | 1080.62 | 1080.89 |
| 49 | Ac-QSQQTF$r8NL6clWRLL$QN-NH₂ | 781 | 2142.11 | 1072.06 | 1072.35 |
| 50 | Ac-QSQQTF$r8NLMe6clwRLL$QN-NH₂ | 782 | 2156.13 | 1079.07 | 1079.27 |
| 51 | Ac-LTFEHYWAQLTS-NH₂ | 783 | 1535.74 | 768.87 | 768.91 |
| 52 | Ac-LTF$HYW$QLTS-NH₂ | 784 | 1585.83 | 793.92 | 794.17 |
| 53 | Ac-LTFE$YWA$LTS-NH₂ | 785 | 1520.79 | 761.40 | 761.67 |
| 54 | Ac-LTF$zr8HYWAQL$zS-NH₂ | 786 | 1597.87 | 799.94 | 800.06 |
| 55 | Ac-LTF$r8HYWRQL$S-NH₂ | 787 | 1682.93 | 842.47 | 842.72 |
| 56 | Ac-QS$QTFStNLWRLL$s8QN-NH₂ | 788 | 2145.21 | 1073.61 | 1073.90 |
| 57 | Ac-QSQQTASNLWRLLPQN-NH₂ | 789 | 1923.99 | 963.00 | 963.26 |
| 58 | Ac-QSQQTA$/r8NLWRLL$/QN-NH₂ | 790 | 2060.15 | 1031.08 | 1031.24 |
| 59 | Ac-ASQQTF$/r8NLWRLL$/QN-NH₂ | 791 | 2079.16 | 1040.58 | 1040.89 |
| 60 | Ac-$SQQ$FSNLWRLLAibQN-NH₂ | 792 | 2009.09 | 1005.55 | 1005.86 |
| 61 | Ac-QS$QTF$NLWRLLAibQN-NH₂ | 793 | 2023.10 | 1012.55 | 1012.79 |
| 62 | Ac-QSQQ$FSN$WRLLAibQN-NH₂ | 794 | 2024.06 | 1013.03 | 1013.31 |
| 63 | Ac-QSQQTF$NLW$LLAibQN-NH₂ | 795 | 1995.06 | 998.53 | 998.87 |
| 64 | Ac-QSQQTFS$LWR$LAibQN-NH₂ | 796 | 2011.06 | 1006.53 | 1006.83 |
| 65 | Ac-QSQQTFSNLW$LLA$N-NH₂ | 797 | 1940.02 | 971.01 | 971.29 |
| 66 | Ac-$/SQQ$/FSNLWRLLAibQN-NH₂ | 798 | 2037.12 | 1019.56 | 1019.78 |
| 67 | Ac-QS$/QTF$/NLWRLLAibQN-NH₂ | 799 | 2051.13 | 1026.57 | 1026.90 |
| 68 | Ac-QSQQ$/FSN$/WRLLAibQN-NH₂ | 800 | 2052.09 | 1027.05 | 1027.36 |
| 69 | Ac-QSQQTF$/NLW$/LLAibQN-NH₂ | 801 | 2023.09 | 1012.55 | 1013.82 |
| 70 | Ac-QSQ$TFS$LWRLLAibQN-NH₂ | 802 | 1996.09 | 999.05 | 999.39 |
| 71 | Ac-QSQ$/TFS$/LWRLLAibQN-NH₂ | 803 | 2024.12 | 1013.06 | 1013.37 |
| 72 | Ac-QS$/QTFSt//NLWRLL$/s8QN-NH₂ | 804 | 2201.27 | 1101.64 | 1102.00 |
| 73 | Ac-$r8SQQTFS$LWRLLAibQN-NH₂ | 805 | 2038.14 | 1020.07 | 1020.23 |
| 74 | Ac-QSQ$r8TFSNLW$LLAibQN-NH₂ | 806 | 1996.08 | 999.04 | 999.32 |
| 75 | Ac-QSQQTFS$r8LWRLLA$N-NH₂ | 807 | 2024.12 | 1013.06 | 1013.37 |
| 76 | Ac-QS$r5QTFStNLW$LLAibQN-NH₂ | 808 | 2032.12 | 1017.06 | 1017.39 |
| 77 | Ac-$/r8SQQTFS$/LWRLLAibQN-NH₂ | 809 | 2066.17 | 1034.09 | 1034.80 |
| 78 | Ac-QSQ$/r8TFSNLW$/LLAibQN-NH₂ | 810 | 2024.11 | 1013.06 | 1014.34 |
| 79 | Ac-QSQQTFS$/r8LWRLLA$/N-NH₂ | 811 | 2052.15 | 1027.08 | 1027.16 |
| 80 | Ac-QS$/r5QTFSt//NLW$/LLAibQN-NH₂ | 812 | 2088.18 | 1045.09 | 1047.10 |
| 81 | Ac-QSQQTFSNLWRLLAibQN-NH₂ | 813 | 1988.02 | 995.01 | 995.31 |
| 82 | Hep/QSQ$/TF$/r8NLWRLL$/QN-NH₂ | 814 | 2215.29 | 1108.65 | 1108.93 |
| 83 | Ac-ASQQTF$r8NLRWLL$QN-NH₂ | 815 | 2051.13 | 1026.57 | 1026.90 |
| 84 | Ac-QSQQTF$/r8NLWRLL$/Q-NH₂ | 816 | 2022.14 | 1012.07 | 1012.66 |
| 85 | Ac-QSQQTF$r8NLWRLL$Q-NH₂ | 817 | 1994.11 | 998.06 | 998.42 |
| 86 | Ac-AAARAA$r8AAARAA$AA-NH₂ | 818 | 1515.90 | 758.95 | 759.21 |
| 87 | Ac-LTFEHYWAQLTSA-NH₂ | 819 | 1606.78 | 804.39 | 804.59 |
| 88 | Ac-LTF$r8HYWAQL$SA-NH₂ | 820 | 1668.90 | 835.45 | 835.67 |
| 89 | Ac-ASQQTFSNLWRLLPQN-NH₂ | 821 | 1943.00 | 972.50 | 973.27 |
| 90 | Ac-QS$QTFStNLW$r5LLAibQN-NH₂ | 822 | 2032.12 | 1017.06 | 1017.30 |
| 91 | Ac-QSQQTFAibNLWRLLAibQN-NH₂ | 823 | 1986.04 | 994.02 | 994.19 |
| 92 | Ac-QSQQTFNleNLWRLLNleQN-NH₂ | 824 | 2042.11 | 1022.06 | 1022.23 |
| 93 | Ac-QSQQTF$/r8NLWRLLAibQN-NH₂ | 825 | 2082.14 | 1042.07 | 1042.23 |
| 94 | Ac-QSQQTF$/r8NLWRLLNleQN-NH₂ | 826 | 2110.17 | 1056.09 | 1056.29 |
| 95 | Ac-QSQQTFAibNLWRLL$/QN-NH₂ | 827 | 2040.09 | 1021.05 | 1021.25 |
| 96 | Ac-QSQQTFNleNLWRLL$/QN-NH₂ | 828 | 2068.12 | 1035.06 | 1035.31 |
| 97 | Ac-QSQQTF % r8NL6clWRNleL % QN-NH₂ | 829 | 2144.13 | 1073.07 | 1073.32 |
| 98 | Ac-QSQQTF % r8NLMe6clWRLL % QN-NH₂ | 830 | 2158.15 | 1080.08 | 1080.31 |
| 101 | Ac-FNle$YWE$L-NH₂ | 831 | 1160.63 | — | 1161.70 |
| 102 | Ac-F$r8AYWELL$A-NH₂ | 832 | 1344.75 | — | 1345.90 |
| 103 | Ac-F$r8AYWQLL$A-NH₂ | 833 | 1343.76 | — | 1344.83 |
| 104 | Ac-NlePRF$r8NYWELL$QN-NH₂ | 834 | 1925.06 | 963.53 | 963.69 |
| 105 | Ac-NlePRF$r8DYWRLL$QN-NH₂ | 835 | 1953.10 | 977.55 | 977.68 |
| 106 | Ac-NlePRF$r8NYWRLL$Q-NH₂ | 836 | 1838.07 | 920.04 | 920.18 |
| 107 | Ac-NlePRF$r8NYWRLL$-NH₂ | 837 | 1710.01 | 856.01 | 856.13 |
| 108 | Ac-QSQQTF$r8DLWRLL$QN-NH₂ | 838 | 2109.14 | 1055.57 | 1055.64 |
| 109 | Ac-QSQQTF$r8NLWRLL$EN-NH₂ | 839 | 2109.14 | 1055.57 | 1055.70 |
| 110 | Ac-QSQQTF$r8NLWRLL$QD-NH₂ | 840 | 2109.14 | 1055.57 | 1055.64 |
| 111 | Ac-QSQQTF$r8NLWRLL$S-NH₂ | 841 | 1953.08 | 977.54 | 977.60 |
| 112 | Ac-ESQQTF$r8NLWRLL$QN-NH₂ | 842 | 2109.14 | 1055.57 | 1055.70 |
| 113 | Ac-LTF$r8NLWRNleL$Q-NH₂ | 843 | 1635.99 | 819.00 | 819.10 |
| 114 | Ac-LRF$r8NLWRNleL$Q-NH₂ | 844 | 1691.04 | 846.52 | 846.68 |
| 115 | Ac-QSQQTF$r8NWWRNleL$QN-NH₂ | 845 | 2181.15 | 1091.58 | 1091.64 |
| 116 | Ac-QSQQTF$r8NLWRNleL$Q-NH₂ | 846 | 1994.11 | 998.06 | 998.07 |
| 117 | Ac-QTF$r8NLWRNleL$QN-NH₂ | 847 | 1765.00 | 883.50 | 883.59 |
| 118 | Ac-NlePRF$r8NWWRLL$QN-NH₂ | 848 | 1975.13 | 988.57 | 988.75 |
| 119 | Ac-NlePRF$r8NWWRLL$A-NH₂ | 849 | 1804.07 | 903.04 | 903.08 |
| 120 | Ac-TSFAEYWNLLNH₂ | 850 | 1467.70 | 734.85 | 734.90 |
| 121 | Ac-QTF$r8HWWSQL$S-NH₂ | 851 | 1651.85 | 826.93 | 827.12 |
| 122 | Ac-FM$YWE$L-NH₂ | 852 | 1178.58 | — | 1179.64 |
| 123 | Ac-QTFEHWWSQLLS-NH₂ | 853 | 1601.76 | 801.88 | 801.94 |
| 124 | Ac-QSQQTF$r8NLAmwRLNle$QN-NH₂ | 854 | 2122.17 | 1062.09 | 1062.24 |
| 125 | Ac-FMAibY6clWEAc3cL-NH₂ | 855 | 1130.47 | — | 1131.53 |
| 126 | Ac-FNle$Y6clWE$L-NH₂ | 856 | 1194.59 | — | 1195.64 |
| 127 | Ac-F$zr8AY6clWEAc3cL$z-NH₂ | 857 | 1277.63 | 639.82 | 1278.71 |
| 128 | Ac-F$r8AY6clWEAc3cL$A-NH₂ | 858 | 1348.66 | — | 1350.72 |
| 129 | Ac-NlePRF$r8NY6clWRLL$QN-NH₂ | 859 | 1986.08 | 994.04 | 994.64 |
| 130 | Ac-AF$r8AAWALA$A-NH₂ | 860 | 1223.71 | — | 1224.71 |
| 131 | Ac-TF$r8AAWRLA$Q-NH₂ | 861 | 1395.80 | 698.90 | 399.04 |
| 132 | Pr-TF$r8AAWRLA$Q-NH₂ | 862 | 1409.82 | 705.91 | 706.04 |
| 133 | Ac-QSQQTF % r8NLWRNleL % QN-NH₂ | 863 | 2110.17 | 1056.09 | 1056.22 |
| 134 | Ac-LTF % r8HYWAQL % SA-NH₂ | 864 | 1670.92 | 836.46 | 836.58 |
| 135 | Ac-NlePRF % r8NYWRLL % QN-NH₂ | 865 | 1954.13 | 978.07 | 978.19 |
| 136 | Ac-NlePRF % r8NY6clWRLL % QN-NH₂ | 866 | 1988.09 | 995.05 | 995.68 |
| 137 | Ac-LTF % r8HY6clWAQL % S-NH₂ | 867 | 1633.84 | 817.92 | 817.93 |
| 138 | Ac-QS % QTF % StNLWRLL % s8QN-NH₂ | 868 | 2149.24 | 1075.62 | 1075.65 |
| 139 | Ac-LTF % r8HY6clWRQL % S-NH₂ | 869 | 1718.91 | 860.46 | 860.54 |
| 140 | Ac-QSQQTF % r8NL6clWRLL % QN-NH₂ | 870 | 2144.13 | 1073.07 | 1073.64 |
| 141 | Ac- % r8SQQTFS % LWRLLAibQN-NH₂ | 871 | 2040.15 | 1021.08 | 1021.13 |
| 142 | Ac-LTF % r8HYWAQL % S-NH₂ | 872 | 1599.88 | 800.94 | 801.09 |
| 143 | Ac-TSF % r8QYWNLL % P-NH₂ | 873 | 1602.88 | 802.44 | 802.58 |
| 147 | Ac-LTFEHYWAQLTS-NH₂ | 874 | 1535.74 | 768.87 | 769.5 |
| 152 | Ac-F$er8AY6clWEAc3cL$e-NH₂ | 875 | 1277.63 | 639.82 | 1278.71 |
| 153 | Ac-AF$r8AAWALA$A-NH₂ | 876 | 1277.63 | 639.82 | 1277.84 |
| 154 | Ac-TF$r8AAWRLA$Q-NH₂ | 877 | 1395.80 | 698.90 | 699.04 |
| 155 | Pr-TF$r8AAWRLA$Q-NH₂ | 878 | 1409.82 | 705.91 | 706.04 |
| 156 | Ac-LTF$er8HYWAQL$eS-NH₂ | 879 | 1597.87 | 799.94 | 800.44 |
| 159 | Ac-CCPGCCBaQSQQTF$r8NLWRLL$QN-NH₂ | 880 | 2745.30 | 1373.65 | 1372.99 |
| 160 | Ac-CCPGCCBaQSQQTA$r8NLWRLL$QN-NH₂ | 881 | 2669.27 | 1335.64 | 1336.09 |
| 161 | Ac-CCPGCCBaNlePRF$r8NYWRLL$QN-NH₂ | 882 | 2589.26 | 1295.63 | 1296.2 |
| 162 | Ac-LTF$/r8HYWAQL$/S-NH₂ | 883 | 1625.90 | 813.95 | 814.18 |
| 163 | Ac-F % r8HY6clWRAc3cL % -NH₂ | 884 | 1372.72 | 687.36 | 687.59 |
| 164 | Ac-QTF % r8HWWSQL % S-NH₂ | 885 | 1653.87 | 827.94 | 827.94 |
| 165 | Ac-LTA$r8HYWRQL$S-NH₂ | 886 | 1606.90 | 804.45 | 804.66 |
| 166 | Ac-Q$r8QQTFSN$WRLLAibQN-NH₂ | 887 | 2080.12 | 1041.06 | 1041.61 |
| 167 | Ac-QSQQ$r8FSNLWR$LAibQN-NH₂ | 888 | 2066.11 | 1034.06 | 1034.58 |
| 168 | Ac-F$r8AYWEAc3cL$A-NH₂ | 889 | 1314.70 | 658.35 | 1315.88 |
| 169 | Ac-F$r8AYWEAc3cL$S-NH₂ | 890 | 1330.70 | 666.35 | 1331.87 |
| 170 | Ac-F$r8AYWEAc3cL$Q-NH₂ | 891 | 1371.72 | 686.86 | 1372.72 |
| 171 | Ac-F$r8AYWEAibL$S-NH₂ | 892 | 1332.71 | 667.36 | 1334.83 |
| 172 | Ac-F$r8AYWEAL$S-NH₂ | 893 | 1318.70 | 660.35 | 1319.73 |
| 173 | Ac-F$r8AYWEQL$S-NH₂ | 894 | 1375.72 | 688.86 | 1377.53 |
| 174 | Ac-F$r8HYWEQL$S-NH₂ | 895 | 1441.74 | 721.87 | 1443.48 |
| 175 | Ac-F$r8HYWAQL$S-NH₂ | 896 | 1383.73 | 692.87 | 1385.38 |
| 176 | Ac-F$r8HYWAAc3cL$S-NH₂ | 897 | 1338.71 | 670.36 | 1340.82 |
| 177 | Ac-F$r8HYWRAc3cL$S-NH₂ | 898 | 1423.78 | 712.89 | 713.04 |
| 178 | Ac-F$r8AYWEAc3cL#A-NH₂ | 899 | 1300.69 | 651.35 | 1302.78 |
| 179 | Ac-NlePTF % r8NYWRLL % QN-NH₂ | 900 | 1899.08 | 950.54 | 950.56 |
| 180 | Ac-TF$r8AAWRAL$Q-NH₂ | 901 | 1395.80 | 698.90 | 699.13 |
| 181 | Ac-TSF % r8HYWAQL % S-NH₂ | 902 | 1573.83 | 787.92 | 787.98 |
| 184 | Ac-F % r8AY6clWEAc3cL % A-NH₂ | 903 | 1350.68 | 676.34 | 676.91 |
| 185 | Ac-LTF$r8HYWAQI$S-NH₂ | 904 | 1597.87 | 799.94 | 800.07 |
| 186 | Ac-LTF$r8HYWAQNle$S-NH₂ | 905 | 1597.87 | 799.94 | 800.07 |
| 187 | Ac-LTF$r8HYWAQL$A-NH₂ | 906 | 1581.87 | 791.94 | 792.45 |
| 188 | Ac-LTF$r8HYWAQL$Abu-NH₂ | 907 | 1595.89 | 798.95 | 799.03 |
| 189 | Ac-LTF$r8HYWAbuQL$S-NH₂ | 908 | 1611.88 | 806.94 | 807.47 |
| 190 | Ac-LTF$er8AYWAQL$eS-NH₂ | 909 | 1531.84 | 766.92 | 766.96 |
| 191 | Ac-LAF$r8HYWAQL$S-NH₂ | 910 | 1567.86 | 784.93 | 785.49 |
| 192 | Ac-LAF$r8AYWAQL$S-NH₂ | 911 | 1501.83 | 751.92 | 752.01 |
| 193 | Ac-LTF$er8AYWAQL$eA-NH₂ | 912 | 1515.85 | 758.93 | 758.97 |
| 194 | Ac-LAF$r8AYWAQL$A-NH₂ | 913 | 1485.84 | 743.92 | 744.05 |
| 195 | Ac-LTF$r8NLWANleL$Q-NH₂ | 914 | 1550.92 | 776.46 | 776.61 |
| 196 | Ac-LTF$r8NLWANleL$A-NH₂ | 915 | 1493.90 | 747.95 | 1495.6 |
| 197 | Ac-LTF$r8ALWANleL$Q-NH₂ | 916 | 1507.92 | 754.96 | 755 |
| 198 | Ac-LAF$r8NLWANleL$Q-NH₂ | 917 | 1520.91 | 761.46 | 761.96 |
| 199 | Ac-LAF$r8ALWANleL$A-NH₂ | 918 | 1420.89 | 711.45 | 1421.74 |
| 200 | Ac-A$r8AYWEAc3cL$A-NH₂ | 919 | 1238.67 | 620.34 | 1239.65 |
| 201 | Ac-F$r8AYWEAc3cL$AA-NH₂ | 920 | 1385.74 | 693.87 | 1386.64 |
| 202 | Ac-F$r8AYWEAc3cL$Abu-NH₂ | 921 | 1328.72 | 665.36 | 1330.17 |
| 203 | Ac-F$r8AYWEAc3cL$Nle-NH₂ | 922 | 1356.75 | 679.38 | 1358.22 |
| 204 | Ac-F$r5AYWEAc3cL$s8A-NH₂ | 923 | 1314.70 | 658.35 | 1315.51 |
| 205 | Ac-F$AYWEAc3cL$r8A-NH₂ | 924 | 1314.70 | 658.35 | 1315.66 |
| 206 | Ac-F$r8AYWEAc3cI$A-NH₂ | 925 | 1314.70 | 658.35 | 1316.18 |
| 207 | Ac-F$r8AYWEAc3cNle$A-NH₂ | 926 | 1314.70 | 658.35 | 1315.66 |
| 208 | Ac-F$r8AYWEAmlL$A-NH₂ | 927 | 1358.76 | 680.38 | 1360.21 |
| 209 | Ac-F$r8AYWENleL$A-NH₂ | 928 | 1344.75 | 673.38 | 1345.71 |
| 210 | Ac-F$r8AYWQAc3cL$A-NH₂ | 929 | 1313.72 | 657.86 | 1314.7 |
| 211 | Ac-F$r8AYWAAc3cL$A-NH₂ | 930 | 1256.70 | 629.35 | 1257.56 |
| 212 | Ac-F$r8AYWAbuAc3cL$A-NH₂ | 931 | 1270.71 | 636.36 | 1272.14 |
| 213 | Ac-F$r8AYWNleAc3cL$A-NH₂ | 932 | 1298.74 | 650.37 | 1299.67 |
| 214 | Ac-F$r8AbuYWEAc3cL$A-NH₂ | 933 | 1328.72 | 665.36 | 1329.65 |
| 215 | Ac-F$r8NleYWEAc3cL$A-NH₂ | 934 | 1356.75 | 679.38 | 1358.66 |
| 216 | 5-FAM-BaLTFEHYWAQLTS-NH₂ | 935 | 1922.82 | 962.41 | 962.87 |
| 217 | 5-FAM-BaLTF % r8HYWAQL % S-NH₂ | 936 | 1986.96 | 994.48 | 994.97 |
| 218 | Ac-LTF$r8HYWAQhL$S-NH₂ | 937 | 1611.88 | 806.94 | 807 |
| 219 | Ac-LTF$r8HYWAQTle$S-NH₂ | 938 | 1597.87 | 799.94 | 799.97 |
| 220 | Ac-LTF$r8HYWAQAdm$S-NH₂ | 939 | 1675.91 | 838.96 | 839.09 |
| 221 | Ac-LTF$r8HYWAQhCha$S-NH₂ | 940 | 1651.91 | 826.96 | 826.98 |
| 222 | Ac-LTF$r8HYWAQCha$S-NH₂ | 941 | 1637.90 | 819.95 | 820.02 |
| 223 | Ac-LTF$r8HYWAc6cQL$S-NH₂ | 942 | 1651.91 | 826.96 | 826.98 |
| 224 | Ac-LTF$r8HYWAc5cQL$S-NH₂ | 943 | 1637.90 | 819.95 | 820.02 |
| 225 | Ac-LThF$r8HYWAQL$S-NH₂ | 944 | 1611.88 | 806.94 | 807 |
| 226 | Ac-LTIgl$r8HYWAQL$S-NH₂ | 945 | 1625.90 | 813.95 | 812.99 |
| 227 | Ac-LTF$r8HYWAQChg$S-NH₂ | 946 | 1623.88 | 812.94 | 812.99 |
| 228 | Ac-LTF$r8HYWAQF$S-NH₂ | 947 | 1631.85 | 816.93 | 816.99 |
| 229 | Ac-LTF$r8HYWAQIgl$S-NH₂ | 948 | 1659.88 | 830.94 | 829.94 |
| 230 | Ac-LTF$r8HYWAQCba$S-NH₂ | 949 | 1609.87 | 805.94 | 805.96 |
| 231 | Ac-LTF$r8HYWAQCpg$S-NH₂ | 950 | 1609.87 | 805.94 | 805.96 |
| 232 | Ac-LTF$r8HhYWAQL$S-NH₂ | 951 | 1611.88 | 806.94 | 807 |
| 233 | Ac-F$r8AYWEAc3chL$A-NH₂ | 952 | 1328.72 | 665.36 | 665.43 |
| 234 | Ac-F$r8AYWEAc3cTle$A-NH₂ | 953 | 1314.70 | 658.35 | 1315.62 |
| 235 | Ac-F$r8AYWEAc3cAdm$A-NH₂ | 954 | 1392.75 | 697.38 | 697.47 |
| 236 | Ac-F$r8AYWEAc3chCha$A-NH₂ | 955 | 1368.75 | 685.38 | 685.34 |
| 237 | Ac-F$r8AYWEAc3cCha$A-NH₂ | 956 | 1354.73 | 678.37 | 678.38 |
| 238 | Ac-F$r8AYWEAc6cL$A-NH₂ | 957 | 1356.75 | 679.38 | 679.42 |
| 239 | Ac-F$r8AYWEAc5cL$A-NH₂ | 958 | 1342.73 | 672.37 | 672.46 |
| 240 | Ac-hF$r8AYWEAc3cL$A-NH₂ | 959 | 1328.72 | 665.36 | 665.43 |
| 241 | Ac-Igl$r8AYWEAc3cL$A-NH₂ | 960 | 1342.73 | 672.37 | 671.5 |
| 243 | Ac-F$r8AYWEAc3cF$A-NH₂ | 961 | 1348.69 | 675.35 | 675.35 |
| 244 | Ac-F$r8AYWEAc3cIgl$A-NH₂ | 962 | 1376.72 | 689.36 | 688.37 |
| 245 | Ac-F$r8AYWEAc3cCba$A-NH₂ | 963 | 1326.70 | 664.35 | 664.47 |
| 246 | Ac-F$r8AYWEAc3cCpg$A-NH₂ | 964 | 1326.70 | 664.35 | 664.39 |
| 247 | Ac-F$r8AhYWEAc3cL$A-NH₂ | 965 | 1328.72 | 665.36 | 665.43 |
| 248 | Ac-F$r8AYWEAc3cL$Q-NH₂ | 966 | 1371.72 | 686.86 | 1372.87 |
| 249 | Ac-F$r8AYWEAibL$A-NH₂ | 967 | 1316.72 | 659.36 | 1318.18 |
| 250 | Ac-F$r8AYWEAL$A-NH₂ | 968 | 1302.70 | 652.35 | 1303.75 |
| 251 | Ac-LAF$r8AYWAAL$A-NH₂ | 969 | 1428.82 | 715.41 | 715.49 |
| 252 | Ac-LTF$r8HYWAAc3cL$S-NH₂ | 970 | 1552.84 | 777.42 | 777.5 |
| 253 | Ac-NleTF$r8HYWAQL$S-NH₂ | 971 | 1597.87 | 799.94 | 800.04 |
| 254 | Ac-VTF$r8HYWAQL$S-NH₂ | 972 | 1583.85 | 792.93 | 793.04 |
| 255 | Ac-FTF$r8HYWAQL$S-NH₂ | 973 | 1631.85 | 816.93 | 817.02 |
| 256 | Ac-WTF$r8HYWAQL$S-NH₂ | 974 | 1670.86 | 836.43 | 836.85 |
| 257 | Ac-RTF$r8HYWAQL$S-NH₂ | 975 | 1640.88 | 821.44 | 821.9 |
| 258 | Ac-KTF$r8HYWAQL$S-NH₂ | 976 | 1612.88 | 807.44 | 807.91 |
| 259 | Ac-LNleF$r8HYWAQL$S-NH₂ | 977 | 1609.90 | 805.95 | 806.43 |
| 260 | Ac-LVF$r8HYWAQL$S-NH₂ | 978 | 1595.89 | 798.95 | 798.93 |
| 261 | Ac-LFF$r8HYWAQL$S-NH₂ | 979 | 1643.89 | 822.95 | 823.38 |
| 262 | Ac-LWF$r8HYWAQL$S-NH₂ | 980 | 1682.90 | 842.45 | 842.55 |
| 263 | Ac-LRF$r8HYWAQL$S-NH₂ | 981 | 1652.92 | 827.46 | 827.52 |
| 264 | Ac-LKF$r8HYWAQL$S-NH₂ | 982 | 1624.91 | 813.46 | 813.51 |
| 265 | Ac-LTF$r8NleYWAQL$S-NH₂ | 983 | 1573.89 | 787.95 | 788.05 |
| 266 | Ac-LTF$r8VYWAQL$S-NH₂ | 984 | 1559.88 | 780.94 | 780.98 |
| 267 | Ac-LTF$r8FYWAQL$S-NH₂ | 985 | 1607.88 | 804.94 | 805.32 |
| 268 | Ac-LTF$r8WYWAQL$S-NH₂ | 986 | 1646.89 | 824.45 | 824.86 |
| 269 | Ac-LTF$r8RYWAQL$S-NH₂ | 987 | 1616.91 | 809.46 | 809.51 |
| 270 | Ac-LTF$r8KYWAQL$S-NH₂ | 988 | 1588.90 | 795.45 | 795.48 |
| 271 | Ac-LTF$r8HNleWAQL$S-NH₂ | 989 | 1547.89 | 774.95 | 774.98 |
| 272 | Ac-LTF$r8HVWAQL$S-NH₂ | 990 | 1533.87 | 767.94 | 767.95 |
| 273 | Ac-LTF$r8HFWAQL$S-NH₂ | 991 | 1581.87 | 791.94 | 792.3 |
| 274 | Ac-LTF$r8HWWAQL$S-NH₂ | 992 | 1620.88 | 811.44 | 811.54 |
| 275 | Ac-LTF$r8HRWAQL$S-NH₂ | 993 | 1590.90 | 796.45 | 796.52 |
| 276 | Ac-LTF$r8HKWAQL$S-NH₂ | 994 | 1562.90 | 782.45 | 782.53 |
| 277 | Ac-LTF$r8HYWNleQL$S-NH₂ | 995 | 1639.91 | 820.96 | 820.98 |
| 278 | Ac-LTF$r8HYWVQL$S-NH₂ | 996 | 1625.90 | 813.95 | 814.03 |
| 279 | Ac-LTF$r8HYWFQL$S-NH₂ | 997 | 1673.90 | 837.95 | 838.03 |
| 280 | Ac-LTF$r8HYWWQL$S-NH₂ | 998 | 1712.91 | 857.46 | 857.5 |
| 281 | Ac-LTF$r8HYWKQL$S-NH₂ | 999 | 1654.92 | 828.46 | 828.49 |
| 282 | Ac-LTF$r8HYWANleL$S-NH₂ | 1000 | 1582.89 | 792.45 | 792.52 |
| 283 | Ac-LTF$r8HYWAVL$S-NH₂ | 1001 | 1568.88 | 785.44 | 785.49 |
| 284 | Ac-LTF$r8HYWAFL$S-NH₂ | 1002 | 1616.88 | 809.44 | 809.47 |
| 285 | Ac-LTF$r8HYWAWL$S-NH₂ | 1003 | 1655.89 | 828.95 | 829 |
| 286 | Ac-LTF$r8HYWARL$S-NH₂ | 1004 | 1625.91 | 813.96 | 813.98 |
| 287 | Ac-LTF$r8HYWAQL$Nle-NH₂ | 1005 | 1623.92 | 812.96 | 813.39 |
| 288 | Ac-LTF$r8HYWAQL$V-NH₂ | 1006 | 1609.90 | 805.95 | 805.99 |
| 289 | Ac-LTF$r8HYWAQL$F-NH₂ | 1007 | 1657.90 | 829.95 | 830.26 |
| 290 | Ac-LTF$r8HYWAQL$W-NH₂ | 1008 | 1696.91 | 849.46 | 849.5 |
| 291 | Ac-LTF$r8HYWAQL$R-NH₂ | 1009 | 1666.94 | 834.47 | 834.56 |
| 292 | Ac-LTF$r8HYWAQL$K-NH₂ | 1010 | 1638.93 | 820.47 | 820.49 |
| 293 | Ac-Q$r8QQTFSN$WRLLAibQN-NH₂ | 1011 | 2080.12 | 1041.06 | 1041.54 |
| 294 | Ac-QSQQ$r8FSNLWR$LAibQN-NH₂ | 1012 | 2066.11 | 1034.06 | 1034.58 |
| 295 | Ac-LT2Pal$r8HYWAQL$S-NH₂ | 1013 | 1598.86 | 800.43 | 800.49 |
| 296 | Ac-LT3Pal$r8HYWAQL$S-NH₂ | 1014 | 1598.86 | 800.43 | 800.49 |
| 297 | Ac-LT4Pal$r8HYWAQL$S-NH₂ | 1015 | 1598.86 | 800.43 | 800.49 |
| 298 | Ac-LTF2CF3$r8HYWAQL$S-NH₂ | 1016 | 1665.85 | 833.93 | 834.01 |
| 299 | Ac-LTF2CN$r8HYWAQL$S-NH₂ | 1017 | 1622.86 | 812.43 | 812.47 |
| 300 | Ac-LTF2Me$r8HYWAQL$S-NH₂ | 1018 | 1611.88 | 806.94 | 807 |
| 301 | Ac-LTF3Cl$r8HYWAQL$S-NH₂ | 1019 | 1631.83 | 816.92 | 816.99 |
| 302 | Ac-LTF4CF3$r8HYWAQL$S-NH₂ | 1020 | 1665.85 | 833.93 | 833.94 |
| 303 | Ac-LTF4tBu$r8HYWAQL$S-NH₂ | 1021 | 1653.93 | 827.97 | 828.02 |
| 304 | Ac-LTF5F$r8HYWAQL$S-NH₂ | 1022 | 1687.82 | 844.91 | 844.96 |
| 305 | Ac-LTF$r8HY3BthAAQL$S-NH₂ | 1023 | 1614.83 | 808.42 | 808.48 |
| 306 | Ac-LTF2Br$r8HYWAQL$S-NH₂ | 1024 | 1675.78 | 838.89 | 838.97 |
| 307 | Ac-LTF4Br$r8HYWAQL$S-NH₂ | 1025 | 1675.78 | 838.89 | 839.86 |
| 308 | Ac-LTF2Cl$r8HYWAQL$S-NH₂ | 1026 | 1631.83 | 816.92 | 816.99 |
| 309 | Ac-LTF4Cl$r8HYWAQL$S-NH₂ | 1027 | 1631.83 | 816.92 | 817.36 |
| 310 | Ac-LTF3CN$r8HYWAQL$S-NH₂ | 1028 | 1622.86 | 812.43 | 812.47 |
| 311 | Ac-LTF4CN$r8HYWAQL$S-NH₂ | 1029 | 1622.86 | 812.43 | 812.47 |
| 312 | Ac-LTF34C12$r8HYWAQL$S-NH₂ | 1030 | 1665.79 | 833.90 | 833.94 |
| 313 | Ac-LTF34F2$r8HYWAQL$S-NH₂ | 1031 | 1633.85 | 817.93 | 817.95 |
| 314 | Ac-LTF35F2$r8HYWAQL$S-NH₂ | 1032 | 1633.85 | 817.93 | 817.95 |
| 315 | Ac-LTDip$r8HYWAQL$S-NH₂ | 1033 | 1673.90 | 837.95 | 838.01 |
| 316 | Ac-LTF2F$r8HYWAQL$S-NH₂ | 1034 | 1615.86 | 808.93 | 809 |
| 317 | Ac-LTF3F$r8HYWAQL$S-NH₂ | 1035 | 1615.86 | 808.93 | 809 |
| 318 | Ac-LTF4F$r8HYWAQL$S-NH₂ | 1036 | 1615.86 | 808.93 | 809 |
| 319 | Ac-LTF4I$r8HYWAQL$S-NH₂ | 1037 | 1723.76 | 862.88 | 862.94 |
| 320 | Ac-LTF3Me$r8HYWAQL$S-NH₂ | 1038 | 1611.88 | 806.94 | 807.07 |
| 321 | Ac-LTF4Me$r8HYWAQL$S-NH₂ | 1039 | 1611.88 | 806.94 | 807 |
| 322 | Ac-LT1Nal$r8HYWAQL$S-NH₂ | 1040 | 1647.88 | 824.94 | 824.98 |
| 323 | Ac-LT2Nal$r8HYWAQL$S-NH₂ | 1041 | 1647.88 | 824.94 | 825.06 |
| 324 | Ac-LTF3CF3$r8HYWAQL$S-NH₂ | 1042 | 1665.85 | 833.93 | 834.01 |
| 325 | Ac-LTF4NO2$r8HYWAQL$S-NH₂ | 1043 | 1642.85 | 822.43 | 822.46 |
| 326 | Ac-LTF3NO2$r8HYWAQL$S-NH₂ | 1044 | 1642.85 | 822.43 | 822.46 |
| 327 | Ac-LTF$r82ThiYWAQL$S-NH₂ | 1045 | 1613.83 | 807.92 | 807.96 |
| 328 | Ac-LTF$r8HBipWAQL$S-NH₂ | 1046 | 1657.90 | 829.95 | 830.01 |
| 329 | Ac-LTF$r8HF4tBuWAQL$S-NH₂ | 1047 | 1637.93 | 819.97 | 820.02 |
| 330 | Ac-LTF$r8HF4CF3WAQL$S-NH₂ | 1048 | 1649.86 | 825.93 | 826.02 |
| 331 | Ac-LTF$r8HF4ClWAQL$S-NH₂ | 1049 | 1615.83 | 808.92 | 809.37 |
| 332 | Ac-LTF$r8HF4MeWAQL$S-NH₂ | 1050 | 1595.89 | 798.95 | 799.01 |
| 333 | Ac-LTF$r8HF4BrWAQL$S-NH₂ | 1051 | 1659.78 | 830.89 | 830.98 |
| 334 | Ac-LTF$r8HF4CNWAQL$S-NH₂ | 1052 | 1606.87 | 804.44 | 804.56 |
| 335 | Ac-LTF$r8HF4NO2WAQL$S-NH₂ | 1053 | 1626.86 | 814.43 | 814.55 |
| 336 | Ac-LTF$r8HlNalWAQL$S-NH₂ | 1054 | 1631.89 | 816.95 | 817.06 |
| 337 | Ac-LTF$r8H2NalWAQL$S-NH₂ | 1055 | 1631.89 | 816.95 | 816.99 |
| 338 | Ac-LTF$r8HWAQL$S-NH₂ | 1056 | 1434.80 | 718.40 | 718.49 |
| 339 | Ac-LTF$r8HYlNalAQL$S-NH₂ | 1057 | 1608.87 | 805.44 | 805.52 |
| 340 | Ac-LTF$r8HY2NalAQL$S-NH₂ | 1058 | 1608.87 | 805.44 | 805.52 |
| 341 | Ac-LTF$r8HYWAQI$S-NH₂ | 1059 | 1597.87 | 799.94 | 800.07 |
| 342 | Ac-LTF$r8HYWAQNle$S-NH₂ | 1060 | 1597.87 | 799.94 | 800.44 |
| 343 | Ac-LTF$er8HYWAQL$eA-NH₂ | 1061 | 1581.87 | 791.94 | 791.98 |
| 344 | Ac-LTF$r8HYWAQL$Abu-NH₂ | 1062 | 1595.89 | 798.95 | 799.03 |
| 345 | Ac-LTF$r8HYWAbuQL$S-NH₂ | 1063 | 1611.88 | 806.94 | 804.47 |
| 346 | Ac-LAF$r8HYWAQL$S-NH₂ | 1064 | 1567.86 | 784.93 | 785.49 |
| 347 | Ac-LTF$r8NLWANleL$Q-NH₂ | 1065 | 1550.92 | 776.46 | 777.5 |
| 348 | Ac-LTF$r8ALWANleL$Q-NH₂ | 1066 | 1507.92 | 754.96 | 755.52 |
| 349 | Ac-LAF$r8NLWANleL$Q-NH₂ | 1067 | 1520.91 | 761.46 | 762.48 |
| 350 | Ac-F$r8AYWAAc3cL$A-NH₂ | 1068 | 1256.70 | 629.35 | 1257.56 |
| 351 | Ac-LTF$r8AYWAAL$S-NH₂ | 1069 | 1474.82 | 738.41 | 738.55 |
| 352 | Ac-LVF$r8AYWAQL$S-NH₂ | 1070 | 1529.87 | 765.94 | 766 |
| 353 | Ac-LTF$r8AYWAbuQL$S-NH₂ | 1071 | 1545.86 | 773.93 | 773.92 |
| 354 | Ac-LTF$r8AYWNleQL$S-NH₂ | 1072 | 1573.89 | 787.95 | 788.17 |
| 355 | Ac-LTF$r8AbuYWAQL$S-NH₂ | 1073 | 1545.86 | 773.93 | 773.99 |
| 356 | Ac-LTF$r8AYWHQL$S-NH₂ | 1074 | 1597.87 | 799.94 | 799.97 |
| 357 | Ac-LTF$r8AYWKQL$S-NH₂ | 1075 | 1588.90 | 795.45 | 795.53 |
| 358 | Ac-LTF$r8AYWOQL$S-NH₂ | 1076 | 1574.89 | 788.45 | 788.5 |
| 359 | Ac-LTF$r8AYWRQL$S-NH₂ | 1077 | 1616.91 | 809.46 | 809.51 |
| 360 | Ac-LTF$r8AYWSQL$S-NH₂ | 1078 | 1547.84 | 774.92 | 774.96 |
| 361 | Ac-LTF$r8AYWRAL$S-NH₂ | 1079 | 1559.89 | 780.95 | 780.95 |
| 362 | Ac-LTF$r8AYWRQL$A-NH₂ | 1080 | 1600.91 | 801.46 | 801.52 |
| 363 | Ac-LTF$r8AYWRAL$A-NH₂ | 1081 | 1543.89 | 772.95 | 773.03 |
| 364 | Ac-LTF$r5HYWAQL$s8S-NH₂ | 1082 | 1597.87 | 799.94 | 799.97 |
| 365 | Ac-LTF$HYWAQL$r8S-NH₂ | 1083 | 1597.87 | 799.94 | 799.97 |
| 366 | Ac-LTF$r8HYWAAL$S-NH₂ | 1084 | 1540.84 | 771.42 | 771.48 |
| 367 | Ac-LTF$r8HYWAAbuL$S-NH₂ | 1085 | 1554.86 | 778.43 | 778.51 |
| 368 | Ac-LTF$r8HYWALL$S-NH₂ | 1086 | 1582.89 | 792.45 | 792.49 |
| 369 | Ac-F$r8AYWHAL$A-NH₂ | 1087 | 1310.72 | 656.36 | 656.4 |
| 370 | Ac-F$r8AYWAAL$A-NH₂ | 1088 | 1244.70 | 623.35 | 1245.61 |
| 371 | Ac-F$r8AYWSAL$A-NH₂ | 1089 | 1260.69 | 631.35 | 1261.6 |
| 372 | Ac-F$r8AYWRAL$A-NH₂ | 1090 | 1329.76 | 665.88 | 1330.72 |
| 373 | Ac-F$r8AYWKAL$A-NH₂ | 1091 | 1301.75 | 651.88 | 1302.67 |
| 374 | Ac-F$r8AYWOAL$A-NH₂ | 1092 | 1287.74 | 644.87 | 1289.13 |
| 375 | Ac-F$r8VYWEAc3cL$A-NH₂ | 1093 | 1342.73 | 672.37 | 1343.67 |
| 376 | Ac-F$r8FYWEAc3cL$A-NH₂ | 1094 | 1390.73 | 696.37 | 1392.14 |
| 377 | Ac-F$r8WYWEAc3cL$A-NH₂ | 1095 | 1429.74 | 715.87 | 1431.44 |
| 378 | Ac-F$r8RYWEAc3cL$A-NH₂ | 1096 | 1399.77 | 700.89 | 700.95 |
| 379 | Ac-F$r8KYWEAc3cL$A-NH₂ | 1097 | 1371.76 | 686.88 | 686.97 |
| 380 | Ac-F$r8ANleWEAc3cL$A-NH₂ | 1098 | 1264.72 | 633.36 | 1265.59 |
| 381 | Ac-F$r8AVWEAc3cL$A-NH₂ | 1099 | 1250.71 | 626.36 | 1252.2 |
| 382 | Ac-F$r8AFWEAc3cL$A-NH₂ | 1100 | 1298.71 | 650.36 | 1299.64 |
| 383 | Ac-F$r8AWWEAc3cL$A-NH₂ | 1101 | 1337.72 | 669.86 | 1338.64 |
| 384 | Ac-F$r8ARWEAc3cL$A-NH₂ | 1102 | 1307.74 | 654.87 | 655 |
| 385 | Ac-F$r8AKWEAc3cL$A-NH₂ | 1103 | 1279.73 | 640.87 | 641.01 |
| 386 | Ac-F$r8AYWVAc3cL$A-NH₂ | 1104 | 1284.73 | 643.37 | 643.38 |
| 387 | Ac-F$r8AYWFAc3cL$A-NH₂ | 1105 | 1332.73 | 667.37 | 667.43 |
| 388 | Ac-F$r8AYWWAc3cL$A-NH₂ | 1106 | 1371.74 | 686.87 | 686.97 |
| 389 | Ac-F$r8AYWRAc3cL$A-NH₂ | 1107 | 1341.76 | 671.88 | 671.94 |
| 390 | Ac-F$r8AYWKAc3cL$A-NH₂ | 1108 | 1313.75 | 657.88 | 657.88 |
| 391 | Ac-F$r8AYWEVL$A-NH₂ | 1109 | 1330.73 | 666.37 | 666.47 |
| 392 | Ac-F$r8AYWEFL$A-NH₂ | 1110 | 1378.73 | 690.37 | 690.44 |
| 393 | Ac-F$r8AYWEWL$A-NH₂ | 1111 | 1417.74 | 709.87 | 709.91 |
| 394 | Ac-F$r8AYWERL$A-NH₂ | 1112 | 1387.77 | 694.89 | 1388.66 |
| 395 | Ac-F$r8AYWEKL$A-NH₂ | 1113 | 1359.76 | 680.88 | 1361.21 |
| 396 | Ac-F$r8AYWEAc3cL$V-NH₂ | 1114 | 1342.73 | 672.37 | 1343.59 |
| 397 | Ac-F$r8AYWEAc3cL$F-NH₂ | 1115 | 1390.73 | 696.37 | 1392.58 |
| 398 | Ac-F$r8AYWEAc3cL$W-NH₂ | 1116 | 1429.74 | 715.87 | 1431.29 |
| 399 | Ac-F$r8AYWEAc3cL$R-NH₂ | 1117 | 1399.77 | 700.89 | 700.95 |
| 400 | Ac-F$r8AYWEAc3cL$K-NH₂ | 1118 | 1371.76 | 686.88 | 686.97 |
| 401 | Ac-F$r8AYWEAc3cL$AV-NH₂ | 1119 | 1413.77 | 707.89 | 707.91 |
| 402 | Ac-F$r8AYWEAc3cL$AF-NH₂ | 1120 | 1461.77 | 731.89 | 731.96 |
| 403 | Ac-F$r8AYWEAc3cL$AW-NH₂ | 1121 | 1500.78 | 751.39 | 751.5 |
| 404 | Ac-F$r8AYWEAc3cL$AR-NH₂ | 1122 | 1470.80 | 736.40 | 736.47 |
| 405 | Ac-F$r8AYWEAc3cL$AK-NH₂ | 1123 | 1442.80 | 722.40 | 722.41 |
| 406 | Ac-F$r8AYWEAc3cL$AH-NH₂ | 1124 | 1451.76 | 726.88 | 726.93 |
| 407 | Ac-LTF2NO2$r8HYWAQL$S-NH₂ | 1125 | 1642.85 | 822.43 | 822.54 |
| 408 | Ac-LTA$r8HYAAQL$S-NH₂ | 1126 | 1406.79 | 704.40 | 704.5 |
| 409 | Ac-LTF$r8HYAAQL$S-NH₂ | 1127 | 1482.82 | 742.41 | 742.47 |
| 410 | Ac-QSQQTF$r8NLWALL$AN-NH₂ | 1128 | 1966.07 | 984.04 | 984.38 |
| 411 | Ac-QAibQQTF$r8NLWALL$AN-NH₂ | 1129 | 1964.09 | 983.05 | 983.42 |
| 412 | Ac-QAibQQTF$r8ALWALL$AN-NH₂ | 1130 | 1921.08 | 961.54 | 961.59 |
| 413 | Ac-AAAATF$r8AAWAAL$AA-NH₂ | 1131 | 1608.90 | 805.45 | 805.52 |
| 414 | Ac-F$r8AAWRAL$Q-NH₂ | 1132 | 1294.76 | 648.38 | 648.48 |
| 415 | Ac-TF$r8AAWAAL$Q-NH₂ | 1133 | 1310.74 | 656.37 | 1311.62 |
| 416 | Ac-TF$r8AAWRAL$A-NH₂ | 1134 | 1338.78 | 670.39 | 670.46 |
| 417 | Ac-VF$r8AAWRAL$Q-NH₂ | 1135 | 1393.82 | 697.91 | 697.99 |
| 418 | Ac-AF$r8AAWAAL$A-NH₂ | 1136 | 1223.71 | 612.86 | 1224.67 |
| 420 | Ac-TF$r8AAWKAL$Q-NH₂ | 1137 | 1367.80 | 684.90 | 684.97 |
| 421 | Ac-TF$r8AAWOAL$Q-NH₂ | 1138 | 1353.78 | 677.89 | 678.01 |
| 422 | Ac-TF$r8AAWSAL$Q-NH₂ | 1139 | 1326.73 | 664.37 | 664.47 |
| 423 | Ac-LTF$r8AAWRAL$Q-NH₂ | 1140 | 1508.89 | 755.45 | 755.49 |
| 424 | Ac-F$r8AYWAQL$A-NH₂ | 1141 | 1301.72 | 651.86 | 651.96 |
| 425 | Ac-F$r8AWWAAL$A-NH₂ | 1142 | 1267.71 | 634.86 | 634.87 |
| 426 | Ac-F$r8AWWAQL$A-NH₂ | 1143 | 1324.73 | 663.37 | 663.43 |
| 427 | Ac-F$r8AYWEAL$-NH₂ | 1144 | 1231.66 | 616.83 | 1232.93 |
| 428 | Ac-F$r8AYWAAL$-NH₂ | 1145 | 1173.66 | 587.83 | 1175.09 |
| 429 | Ac-F$r8AYWKAL$-NH₂ | 1146 | 1230.72 | 616.36 | 616.44 |
| 430 | Ac-F$r8AYWOAL$-NH₂ | 1147 | 1216.70 | 609.35 | 609.48 |
| 431 | Ac-F$r8AYWQAL$-NH₂ | 1148 | 1230.68 | 616.34 | 616.44 |
| 432 | Ac-F$r8AYWAQL$-NH₂ | 1149 | 1230.68 | 616.34 | 616.37 |
| 433 | Ac-F$r8HYWDQL$S-NH₂ | 1150 | 1427.72 | 714.86 | 714.86 |
| 434 | Ac-F$r8HFWEQL$S-NH₂ | 1151 | 1425.74 | 713.87 | 713.98 |
| 435 | Ac-F$r8AYWHQL$S-NH₂ | 1152 | 1383.73 | 692.87 | 692.96 |
| 436 | Ac-F$r8AYWKQL$S-NH₂ | 1153 | 1374.77 | 688.39 | 688.45 |
| 437 | Ac-F$r8AYWOQL$S-NH₂ | 1154 | 1360.75 | 681.38 | 681.49 |
| 438 | Ac-F$r8HYWSQL$S-NH₂ | 1155 | 1399.73 | 700.87 | 700.95 |
| 439 | Ac-F$r8HWWEQL$S-NH₂ | 1156 | 1464.76 | 733.38 | 733.44 |
| 440 | Ac-F$r8HWWAQL$S-NH₂ | 1157 | 1406.75 | 704.38 | 704.43 |
| 441 | Ac-F$r8AWWHQL$S-NH₂ | 1158 | 1406.75 | 704.38 | 704.43 |
| 442 | Ac-F$r8AWWKQL$S-NH₂ | 1159 | 1397.79 | 699.90 | 699.92 |
| 443 | Ac-F$r8AWWOQL$S-NH₂ | 1160 | 1383.77 | 692.89 | 692.96 |
| 444 | Ac-F$r8HWWSQL$S-NH₂ | 1161 | 1422.75 | 712.38 | 712.42 |
| 445 | Ac-LTF$r8NYWANleL$Q-NH₂ | 1162 | 1600.90 | 801.45 | 801.52 |
| 446 | Ac-LTF$r8NLWAQL$Q-NH₂ | 1163 | 1565.90 | 783.95 | 784.06 |
| 447 | Ac-LTF$r8NYWANleL$A-NH₂ | 1164 | 1543.88 | 772.94 | 773.03 |
| 448 | Ac-LTF$r8NLWAQL$A-NH₂ | 1165 | 1508.88 | 755.44 | 755.49 |
| 449 | Ac-LTF$r8AYWANleL$Q-NH₂ | 1166 | 1557.90 | 779.95 | 780.06 |
| 450 | Ac-LTF$r8ALWAQL$Q-NH₂ | 1167 | 1522.89 | 762.45 | 762.45 |
| 451 | Ac-LAF$r8NYWANleL$Q-NH₂ | 1168 | 1570.89 | 786.45 | 786.5 |
| 452 | Ac-LAF$r8NLWAQL$Q-NH₂ | 1169 | 1535.89 | 768.95 | 769.03 |
| 453 | Ac-LAF$r8AYWANleL$A-NH₂ | 1170 | 1470.86 | 736.43 | 736.47 |
| 454 | Ac-LAF$r8ALWAQL$A-NH₂ | 1171 | 1435.86 | 718.93 | 719.01 |
| 455 | Ac-LAF$r8AYWAAL$A-NH₂ | 1172 | 1428.82 | 715.41 | 715.41 |
| 456 | Ac-F$r8AYWEAc3cL$AAib-NH₂ | 1173 | 1399.75 | 700.88 | 700.95 |
| 457 | Ac-F$r8AYWAQL$AA-NH₂ | 1174 | 1372.75 | 687.38 | 687.78 |
| 458 | Ac-F$r8AYWAAc3cL$AA-NH₂ | 1175 | 1327.73 | 664.87 | 664.84 |
| 459 | Ac-F$r8AYWSAc3cL$AA-NH₂ | 1176 | 1343.73 | 672.87 | 672.9 |
| 460 | Ac-F$r8AYWEAc3cL$AS-NH₂ | 1177 | 1401.73 | 701.87 | 701.84 |
| 461 | Ac-F$r8AYWEAc3cL$AT-NH₂ | 1178 | 1415.75 | 708.88 | 708.87 |
| 462 | Ac-F$r8AYWEAc3cL$AL-NH₂ | 1179 | 1427.79 | 714.90 | 714.94 |
| 463 | Ac-F$r8AYWEAc3cL$AQ-NH₂ | 1180 | 1442.76 | 722.38 | 722.41 |
| 464 | Ac-F$r8AFWEAc3cL$AA-NH₂ | 1181 | 1369.74 | 685.87 | 685.93 |
| 465 | Ac-F$r8AWWEAc3cL$AA-NH₂ | 1182 | 1408.75 | 705.38 | 705.39 |
| 466 | Ac-F$r8AYWEAc3cL$SA-NH₂ | 1183 | 1401.73 | 701.87 | 701.99 |
| 467 | Ac-F$r8AYWEAL$AA-NH₂ | 1184 | 1373.74 | 687.87 | 687.93 |
| 468 | Ac-F$r8AYWENleL$AA-NH₂ | 1185 | 1415.79 | 708.90 | 708.94 |
| 469 | Ac-F$r8AYWEAc3cL$AbuA-NH₂ | 1186 | 1399.75 | 700.88 | 700.95 |
| 470 | Ac-F$r8AYWEAc3cL$NleA-NH₂ | 1187 | 1427.79 | 714.90 | 714.86 |
| 471 | Ac-F$r8AYWEAibL$NleA-NH₂ | 1188 | 1429.80 | 715.90 | 715.97 |
| 472 | Ac-F$r8AYWEAL$NleA-NH₂ | 1189 | 1415.79 | 708.90 | 708.94 |
| 473 | Ac-F$r8AYWENleL$NleA-NH₂ | 1190 | 1457.83 | 729.92 | 729.96 |
| 474 | Ac-F$r8AYWEAibL$Abu-NH₂ | 1191 | 1330.73 | 666.37 | 666.39 |
| 475 | Ac-F$r8AYWENleL$Abu-NH₂ | 1192 | 1358.76 | 680.38 | 680.39 |
| 476 | Ac-F$r8AYWEAL$Abu-NH₂ | 1193 | 1316.72 | 659.36 | 659.36 |
| 477 | Ac-LTF$r8AFWAQL$S-NH₂ | 1194 | 1515.85 | 758.93 | 759.12 |
| 478 | Ac-LTF$r8AWWAQL$S-NH₂ | 1195 | 1554.86 | 778.43 | 778.51 |
| 479 | Ac-LTF$r8AYWAQI$S-NH₂ | 1196 | 1531.84 | 766.92 | 766.96 |
| 480 | Ac-LTF$r8AYWAQNle$S-NH₂ | 1197 | 1531.84 | 766.92 | 766.96 |
| 481 | Ac-LTF$r8AYWAQL$SA-NH₂ | 1198 | 1602.88 | 802.44 | 802.48 |
| 482 | Ac-LTF$r8AWWAQL$A-NH₂ | 1199 | 1538.87 | 770.44 | 770.89 |
| 483 | Ac-LTF$r8AYWAQI$A-NH₂ | 1200 | 1515.85 | 758.93 | 759.42 |
| 484 | Ac-LTF$r8AYWAQNle$A-NH₂ | 1201 | 1515.85 | 758.93 | 759.42 |
| 485 | Ac-LTF$r8AYWAQL$AA-NH₂ | 1202 | 1586.89 | 794.45 | 794.94 |
| 486 | Ac-LTF$r8HWWAQL$S-NH₂ | 1203 | 1620.88 | 811.44 | 811.47 |
| 487 | Ac-LTF$r8HRWAQL$S-NH₂ | 1204 | 1590.90 | 796.45 | 796.52 |
| 488 | Ac-LTF$r8HKWAQL$S-NH₂ | 1205 | 1562.90 | 782.45 | 782.53 |
| 489 | Ac-LTF$r8HYWAQL$W-NH₂ | 1206 | 1696.91 | 849.46 | 849.5 |
| 491 | Ac-F$r8AYWAbuAL$A-NH₂ | 1207 | 1258.71 | 630.36 | 630.5 |
| 492 | Ac-F$r8AbuYWEAL$A-NH₂ | 1208 | 1316.72 | 659.36 | 659.51 |
| 493 | Ac-NlePRF % r8NYWRLL % QN-NH₂ | 1209 | 1954.13 | 978.07 | 978.54 |
| 494 | Ac-TSF % r8HYWAQL % S-NH₂ | 1210 | 1573.83 | 787.92 | 787.98 |
| 495 | Ac-LTF % r8AYWAQL % S-NH₂ | 1211 | 1533.86 | 767.93 | 768 |
| 496 | Ac-HTF$r8HYWAQL$S-NH₂ | 1212 | 1621.84 | 811.92 | 811.96 |
| 497 | Ac-LHF$r8HYWAQL$S-NH₂ | 1213 | 1633.88 | 817.94 | 818.02 |
| 498 | Ac-LTF$r8HHWAQL$S-NH₂ | 1214 | 1571.86 | 786.93 | 786.94 |
| 499 | Ac-LTF$r8HYWHQL$S-NH₂ | 1215 | 1663.89 | 832.95 | 832.38 |
| 500 | Ac-LTF$r8HYWAHL$S-NH₂ | 1216 | 1606.87 | 804.44 | 804.48 |
| 501 | Ac-LTF$r8HYWAQL$H-NH₂ | 1217 | 1647.89 | 824.95 | 824.98 |
| 502 | Ac-LTF$r8HYWAQL$S-NHPr | 1218 | 1639.91 | 820.96 | 820.98 |
| 503 | Ac-LTF$r8HYWAQL$S-NHsBu | 1219 | 1653.93 | 827.97 | 828.02 |
| 504 | Ac-LTF$r8HYWAQL$S-NHiBu | 1220 | 1653.93 | 827.97 | 828.02 |
| 505 | Ac-LTF$r8HYWAQL$S-NHBn | 1221 | 1687.91 | 844.96 | 844.44 |
| 506 | Ac-LTF$r8HYWAQL$S-NHPe | 1222 | 1700.92 | 851.46 | 851.99 |
| 507 | Ac-LTF$r8HYWAQL$S-NHChx | 1223 | 1679.94 | 840.97 | 841.04 |
| 508 | Ac-ETF$r8AYWAQL$S-NH₂ | 1224 | 1547.80 | 774.90 | 774.96 |
| 509 | Ac-STF$r8AYWAQL$S-NH₂ | 1225 | 1505.79 | 753.90 | 753.94 |
| 510 | Ac-LEF$r8AYWAQL$S-NH₂ | 1226 | 1559.84 | 780.92 | 781.25 |
| 511 | Ac-LSF$r8AYWAQL$S-NH₂ | 1227 | 1517.83 | 759.92 | 759.93 |
| 512 | Ac-LTF$r8EYWAQL$S-NH₂ | 1228 | 1589.85 | 795.93 | 795.97 |
| 513 | Ac-LTF$r8SYWAQL$S-NH₂ | 1229 | 1547.84 | 774.92 | 774.96 |
| 514 | Ac-LTF$r8AYWEQL$S-NH₂ | 1230 | 1589.85 | 795.93 | 795.9 |
| 515 | Ac-LTF$r8AYWAEL$S-NH₂ | 1231 | 1532.83 | 767.42 | 766.96 |
| 516 | Ac-LTF$r8AYWASL$S-NH₂ | 1232 | 1490.82 | 746.41 | 746.46 |
| 517 | Ac-LTF$r8AYWAQL$E-NH₂ | 1233 | 1573.85 | 787.93 | 787.98 |
| 518 | Ac-LTF2CN$r8HYWAQL$S-NH₂ | 1234 | 1622.86 | 812.43 | 812.47 |
| 519 | Ac-LTF3Cl$r8HYWAQL$S-NH₂ | 1235 | 1631.83 | 816.92 | 816.99 |
| 520 | Ac-LTDip$r8HYWAQL$S-NH₂ | 1236 | 1673.90 | 837.95 | 838.01 |
| 521 | Ac-LTF$r8HYWAQTle$S-NH₂ | 1237 | 1597.87 | 799.94 | 800.04 |
| 522 | Ac-F$r8AY6clWEAL$A-NH₂ | 1238 | 1336.66 | 669.33 | 1338.56 |
| 523 | Ac-F$r8AYdl6brWEAL$A-NH₂ | 1239 | 1380.61 | 691.31 | 692.2 |
| 524 | Ac-F$r8AYdl6fWEAL$A-NH₂ | 1240 | 1320.69 | 661.35 | 1321.61 |
| 525 | Ac-F$r8AYdl4mWEAL$A-NH₂ | 1241 | 1316.72 | 659.36 | 659.36 |
| 526 | Ac-F$r8AYdl5clWEAL$A-NH₂ | 1242 | 1336.66 | 669.33 | 669.35 |
| 527 | Ac-F$r8AYdl7mWEAL$A-NH₂ | 1243 | 1316.72 | 659.36 | 659.36 |
| 528 | Ac-LTF % r8HYWAQL % A-NH₂ | 1244 | 1583.89 | 792.95 | 793.01 |
| 529 | Ac-LTF$r8HCouWAQL$S-NH₂ | 1245 | 1679.87 | 840.94 | 841.38 |
| 530 | Ac-LTFEHCouWAQLTS-NH₂ | 1246 | 1617.75 | 809.88 | 809.96 |
| 531 | Ac-LTA$r8HCouWAQL$S-NH₂ | 1247 | 1603.84 | 802.92 | 803.36 |
| 532 | Ac-F$r8AYWEAL$AbuA-NH₂ | 1248 | 1387.75 | 694.88 | 694.88 |
| 533 | Ac-F$r8AYWEAI$AA-NH₂ | 1249 | 1373.74 | 687.87 | 687.93 |
| 534 | Ac-F$r8AYWEANle$AA-NH₂ | 1250 | 1373.74 | 687.87 | 687.93 |
| 535 | Ac-F$r8AYWEAmlL$AA-NH₂ | 1251 | 1429.80 | 715.90 | 715.97 |
| 536 | Ac-F$r8AYWQAL$AA-NH₂ | 1252 | 1372.75 | 687.38 | 687.48 |
| 537 | Ac-F$r8AYWAAL$AA-NH₂ | 1253 | 1315.73 | 658.87 | 658.92 |
| 538 | Ac-F$r8AYWAbuAL$AA-NH₂ | 1254 | 1329.75 | 665.88 | 665.95 |
| 539 | Ac-F$r8AYWNleAL$AA-NH₂ | 1255 | 1357.78 | 679.89 | 679.94 |
| 540 | Ac-F$r8AbuYWEAL$AA-NH₂ | 1256 | 1387.75 | 694.88 | 694.96 |
| 541 | Ac-F$r8NleYWEAL$AA-NH₂ | 1257 | 1415.79 | 708.90 | 708.94 |
| 542 | Ac-F$r8FYWEAL$AA-NH₂ | 1258 | 1449.77 | 725.89 | 725.97 |
| 543 | Ac-LTF$r8HYWAQhL$S-NH₂ | 1259 | 1611.88 | 806.94 | 807 |
| 544 | Ac-LTF$r8HYWAQAdm$S-NH₂ | 1260 | 1675.91 | 838.96 | 839.04 |
| 545 | Ac-LTF$r8HYWAQIgl$S-NH₂ | 1261 | 1659.88 | 830.94 | 829.94 |
| 546 | Ac-F$r8AYWAQL$AA-NH₂ | 1262 | 1372.75 | 687.38 | 687.48 |
| 547 | Ac-LTF$r8ALWAQL$Q-NH₂ | 1263 | 1522.89 | 762.45 | 762.52 |
| 548 | Ac-F$r8AYWEAL$AA-NH₂ | 1264 | 1373.74 | 687.87 | 687.93 |
| 549 | Ac-F$r8AYWENleL$AA-NH₂ | 1265 | 1415.79 | 708.90 | 708.94 |
| 550 | Ac-F$r8AYWEAibL$Abu-NH₂ | 1266 | 1330.73 | 666.37 | 666.39 |
| 551 | Ac-F$r8AYWENleL$Abu-NH₂ | 1267 | 1358.76 | 680.38 | 680.38 |
| 552 | Ac-F$r8AYWEAL$Abu-NH₂ | 1268 | 1316.72 | 659.36 | 659.36 |
| 553 | Ac-F$r8AYWEAc3cL$AbuA-NH₂ | 1269 | 1399.75 | 700.88 | 700.95 |
| 554 | Ac-F$r8AYWEAc3cL$NleA-NH₂ | 1270 | 1427.79 | 714.90 | 715.01 |
| 555 | H-LTF$r8AYWAQL$S-NH₂ | 1271 | 1489.83 | 745.92 | 745.95 |
| 556 | mdPEG3-LTF$r8AYWAQL$S-NH₂ | 1272 | 1679.92 | 840.96 | 840.97 |
| 557 | mdPEG7-LTF$r8AYWAQL$S-NH₂ | 1273 | 1856.02 | 929.01 | 929.03 |
| 558 | Ac-F$r8ApmpEt6clWEAL$A-NH₂ | 1274 | 1470.71 | 736.36 | 788.17 |
| 559 | Ac-LTF3Cl$r8AYWAQL$S-NH₂ | 1275 | 1565.81 | 783.91 | 809.18 |
| 560 | Ac-LTF3Cl$r8HYWAQL$A-NH₂ | 1276 | 1615.83 | 808.92 | 875.24 |
| 561 | Ac-LTF3Cl$r8HYWWQL$S-NH₂ | 1277 | 1746.87 | 874.44 | 841.65 |
| 562 | Ac-LTF3Cl$r8AYWWQL$S-NH₂ | 1278 | 1680.85 | 841.43 | 824.63 |
| 563 | Ac-LTF$r8AYWWQL$S-NH₂ | 1279 | 1646.89 | 824.45 | 849.98 |
| 564 | Ac-LTF$r8HYWWQL$A-NH₂ | 1280 | 1696.91 | 849.46 | 816.67 |
| 565 | Ac-LTF$r8AYWWQL$A-NH₂ | 1281 | 1630.89 | 816.45 | 776.15 |
| 566 | Ac-LTF4F$r8AYWAQL$S-NH₂ | 1282 | 1549.83 | 775.92 | 776.15 |
| 567 | Ac-LTF2F$r8AYWAQL$S-NH₂ | 1283 | 1549.83 | 775.92 | 776.15 |
| 568 | Ac-LTF3F$r8AYWAQL$S-NH₂ | 1284 | 1549.83 | 775.92 | 785.12 |
| 569 | Ac-LTF34F2$r8AYWAQL$S-NH₂ | 1285 | 1567.83 | 784.92 | 785.12 |
| 570 | Ac-LTF35F2$r8AYWAQL$S-NH₂ | 1286 | 1567.83 | 784.92 | 1338.74 |
| 571 | Ac-F3Cl$r8AYWEAL$A-NH₂ | 1287 | 1336.66 | 669.33 | 705.28 |
| 572 | Ac-F3Cl$r8AYWEAL$AA-NH₂ | 1288 | 1407.70 | 704.85 | 680.11 |
| 573 | Ac-F$r8AY6clWEAL$AA-NH₂ | 1289 | 1407.70 | 704.85 | 736.83 |
| 574 | Ac-F$r8AY6clWEAL$-NH₂ | 1290 | 1265.63 | 633.82 | 784.1 |
| 575 | Ac-LTF$r8HYWAQLSt/S-NH₂ | 1291 | 16.03 | 9.02 | 826.98 |
| 576 | Ac-LTF$r8HYWAQL$S-NHsBu | 1292 | 1653.93 | 827.97 | 828.02 |
| 577 | Ac-STF$r8AYWAQL$S-NH₂ | 1293 | 1505.79 | 753.90 | 753.94 |
| 578 | Ac-LTF$r8AYWAEL$S-NH₂ | 1294 | 1532.83 | 767.42 | 767.41 |
| 579 | Ac-LTF$r8AYWAQL$E-NH₂ | 1295 | 1573.85 | 787.93 | 787.98 |
| 580 | mdPEG3-LTF$r8AYWAQL$S-NH₂ | 1296 | 1679.92 | 840.96 | 840.97 |
| 581 | Ac-LTF$r8AYWAQhL$S-NH₂ | 1297 | 1545.86 | 773.93 | 774.31 |
| 583 | Ac-LTF$r8AYWAQCha$S-NH₂ | 1298 | 1571.88 | 786.94 | 787.3 |
| 584 | Ac-LTF$r8AYWAQChg$S-NH₂ | 1299 | 1557.86 | 779.93 | 780.4 |
| 585 | Ac-LTF$r8AYWAQCba$S-NH₂ | 1300 | 1543.84 | 772.92 | 780.13 |
| 586 | Ac-LTF$r8AYWAQF$S-NH₂ | 1301 | 1565.83 | 783.92 | 784.2 |
| 587 | Ac-LTF4F$r8HYWAQhL$S-NH₂ | 1302 | 1629.87 | 815.94 | 815.36 |
| 588 | Ac-LTF4F$r8HYWAQCha$S-NH₂ | 1303 | 1655.89 | 828.95 | 828.39 |
| 589 | Ac-LTF4F$r8HYWAQChg$S-NH₂ | 1304 | 1641.87 | 821.94 | 821.35 |
| 590 | Ac-LTF4F$r8HYWAQCba$S-NH₂ | 1305 | 1627.86 | 814.93 | 814.32 |
| 591 | Ac-LTF4F$r8AYWAQhL$S-NH₂ | 1306 | 1563.85 | 782.93 | 782.36 |
| 592 | Ac-LTF4F$r8AYWAQCha$S-NH₂ | 1307 | 1589.87 | 795.94 | 795.38 |
| 593 | Ac-LTF4F$r8AYWAQChg$S-NH₂ | 1308 | 1575.85 | 788.93 | 788.35 |
| 594 | Ac-LTF4F$r8AYWAQCba$S-NH₂ | 1309 | 1561.83 | 781.92 | 781.39 |
| 595 | Ac-LTF3Cl$r8AYWAQhL$S-NH₂ | 1310 | 1579.82 | 790.91 | 790.35 |
| 596 | Ac-LTF3Cl$r8AYWAQCha$S-NH₂ | 1311 | 1605.84 | 803.92 | 803.67 |
| 597 | Ac-LTF3Cl$r8AYWAQChg$S-NH₂ | 1312 | 1591.82 | 796.91 | 796.34 |
| 598 | Ac-LTF3Cl$r8AYWAQCba$S-NH₂ | 1313 | 1577.81 | 789.91 | 789.39 |
| 599 | Ac-LTF$r8AYWAQhF$S-NH₂ | 1314 | 1579.84 | 790.92 | 791.14 |
| 600 | Ac-LTF$r8AYWAQF3CF3$S-NH₂ | 1315 | 1633.82 | 817.91 | 818.15 |
| 601 | Ac-LTF$r8AYWAQF3Me$S-NH₂ | 1316 | 1581.86 | 791.93 | 791.32 |
| 602 | Ac-LTF$r8AYWAQ1Nal$S-NH₂ | 1317 | 1615.84 | 808.92 | 809.18 |
| 603 | Ac-LTF$r8AYWAQBip$S-NH₂ | 1318 | 1641.86 | 821.93 | 822.13 |
| 604 | Ac-LTF$r8FYWAQL$A-NH₂ | 1319 | 1591.88 | 796.94 | 797.33 |
| 605 | Ac-LTF$r8HYWAQL$S-NHAm | 1320 | 1667.94 | 834.97 | 835.92 |
| 606 | Ac-LTF$r8HYWAQL$S-NHiAm | 1321 | 1667.94 | 834.97 | 835.55 |
| 607 | Ac-LTF$r8HYWAQL$S-NHnPr3Ph | 1322 | 1715.94 | 858.97 | 859.79 |
| 608 | Ac-LTF$r8HYWAQL$S-NHnBu3,3Me | 1323 | 1681.96 | 841.98 | 842.49 |
| 610 | Ac-LTF$r8HYWAQL$S-NHnPr | 1324 | 1639.91 | 820.96 | 821.58 |
| 611 | Ac-LTF$r8HYWAQL$S-NHnEt2Ch | 1325 | 1707.98 | 854.99 | 855.35 |
| 612 | Ac-LTF$r8HYWAQL$S-NHHex | 1326 | 1681.96 | 841.98 | 842.4 |
| 613 | Ac-LTF$r8AYWAQL$S-NHmdPeg2 | 1327 | 1633.91 | 817.96 | 818.35 |
| 614 | Ac-LTF$r8AYWAQL$A-NHmdPeg2 | 1328 | 1617.92 | 809.96 | 810.3 |
| 615 | Ac-LTF$r8AYWAQL$A-NHmdPeg4 | 1329 | 1705.97 | 853.99 | 854.33 |
| 616 | Ac-F$r8AYdl4mWEAL$A-NH₂ | 1330 | 1316.72 | 659.36 | 659.44 |
| 617 | Ac-F$r8AYdl5clWEAL$A-NH₂ | 1331 | 1336.66 | 669.33 | 669.43 |
| 618 | Ac-LThF$r8AYWAQL$S-NH₂ | 1332 | 1545.86 | 773.93 | 774.11 |
| 619 | Ac-LT2Nal$r8AYWAQL$S-NH₂ | 1333 | 1581.86 | 791.93 | 792.43 |
| 620 | Ac-LTA$r8AYWAQL$S-NH₂ | 1334 | 1455.81 | 728.91 | 729.15 |
| 621 | Ac-LTF$r8AYWVQL$S-NH₂ | 1335 | 1559.88 | 780.94 | 781.24 |
| 622 | Ac-LTF$r8HYWAAL$A-NH₂ | 1336 | 1524.85 | 763.43 | 763.86 |
| 623 | Ac-LTF$r8VYWAQL$A-NH₂ | 1337 | 1543.88 | 772.94 | 773.37 |
| 624 | Ac-LTF$r8IYWAQL$S-NH₂ | 1338 | 1573.89 | 787.95 | 788.17 |
| 625 | Ac-FTF$r8VYWSQL$S-NH₂ | 1339 | 1609.85 | 805.93 | 806.22 |
| 626 | Ac-ITF$r8FYWAQL$S-NH₂ | 1340 | 1607.88 | 804.94 | 805.2 |
| 627 | Ac-2NalTF$r8VYWSQL$S-NH₂ | 1341 | 1659.87 | 830.94 | 831.2 |
| 628 | Ac-ITF$r8LYWSQL$S-NH₂ | 1342 | 1589.89 | 795.95 | 796.13 |
| 629 | Ac-FTF$r8FYWAQL$S-NH₂ | 1343 | 1641.86 | 821.93 | 822.13 |
| 630 | Ac-WTF$r8VYWAQL$S-NH₂ | 1344 | 1632.87 | 817.44 | 817.69 |
| 631 | Ac-WTF$r8WYWAQL$S-NH₂ | 1345 | 1719.88 | 860.94 | 861.36 |
| 632 | Ac-VTF$r8AYWSQL$S-NH₂ | 1346 | 1533.82 | 767.91 | 768.19 |
| 633 | Ac-WTF$r8FYWSQL$S-NH₂ | 1347 | 1696.87 | 849.44 | 849.7 |
| 634 | Ac-FTF$r8IYWAQL$S-NH₂ | 1348 | 1607.88 | 804.94 | 805.2 |
| 635 | Ac-WTF$r8VYWSQL$S-NH₂ | 1349 | 1648.87 | 825.44 | 824.8 |
| 636 | Ac-FTF$r8LYWSQL$S-NH₂ | 1350 | 1623.87 | 812.94 | 812.8 |
| 637 | Ac-YTF$r8FYWSQL$S-NH₂ | 1351 | 1673.85 | 837.93 | 837.8 |
| 638 | Ac-LTF$r8AY6clWEAL$A-NH₂ | 1352 | 1550.79 | 776.40 | 776.14 |
| 639 | Ac-LTF$r8AY6clWSQL$S-NH₂ | 1353 | 1581.80 | 791.90 | 791.68 |
| 640 | Ac-F$r8AY6clWSAL$A-NH₂ | 1354 | 1294.65 | 648.33 | 647.67 |
| 641 | Ac-F$r8AY6clWQAL$AA-NH₂ | 1355 | 1406.72 | 704.36 | 703.84 |
| 642 | Ac-LHF$r8AYWAQL$S-NH₂ | 1356 | 1567.86 | 784.93 | 785.21 |
| 643 | Ac-LTF$r8AYWAQL$S-NH₂ | 1357 | 1531.84 | 766.92 | 767.17 |
| 644 | Ac-LTF$r8AHWAQL$S-NH₂ | 1358 | 1505.84 | 753.92 | 754.13 |
| 645 | Ac-LTF$r8AYWAHL$S-NH₂ | 1359 | 1540.84 | 771.42 | 771.61 |
| 646 | Ac-LTF$r8AYWAQL$H-NH₂ | 1360 | 1581.87 | 791.94 | 792.15 |
| 647 | H-LTF$r8AYWAQL$A-NH₂ | 1361 | 1473.84 | 737.92 | 737.29 |
| 648 | Ac-HHF$r8AYWAQL$S-NH₂ | 1362 | 1591.83 | 796.92 | 797.35 |
| 649 | Ac-aAibWTF$r8VYWSQL$S-NH₂ | 1363 | 1804.96 | 903.48 | 903.64 |
| 650 | Ac-AibWTF$r8HYWAQL$S-NH₂ | 1364 | 1755.91 | 878.96 | 879.4 |
| 651 | Ac-AibAWTF$r8HYWAQL$S-NH₂ | 1365 | 1826.95 | 914.48 | 914.7 |
| 652 | Ac-fWTF$r8HYWAQL$S-NH₂ | 1366 | 1817.93 | 909.97 | 910.1 |
| 653 | Ac-AibWWTF$r8HYWAQL$S-NH₂ | 1367 | 1941.99 | 972.00 | 972.2 |
| 654 | Ac-WTF$r8LYWSQL$S-NH₂ | 1368 | 1662.88 | 832.44 | 832.8 |
| 655 | Ac-WTF$r8NleYWSQL$S-NH₂ | 1369 | 1662.88 | 832.44 | 832.6 |
| 656 | Ac-LTF$r8AYWSQL$a-NH₂ | 1370 | 1531.84 | 766.92 | 767.2 |
| 657 | Ac-LTF$r8EYWARL$A-NH₂ | 1371 | 1601.90 | 801.95 | 802.1 |
| 658 | Ac-LTF$r8EYWAHL$A-NH₂ | 1372 | 1582.86 | 792.43 | 792.6 |
| 659 | Ac-aTF$r8AYWAQL$S-NH₂ | 1373 | 1489.80 | 745.90 | 746.08 |
| 660 | Ac-AibTF$r8AYWAQL$S-NH₂ | 1374 | 1503.81 | 752.91 | 753.11 |
| 661 | Ac-AmfTF$r8AYWAQL$S-NH₂ | 1375 | 1579.84 | 790.92 | 791.14 |
| 662 | Ac-AmwTF$r8AYWAQL$S-NH₂ | 1376 | 1618.86 | 810.43 | 810.66 |
| 663 | Ac-NmLTF$r8AYWAQL$S-NH₂ | 1377 | 1545.86 | 773.93 | 774.11 |
| 664 | Ac-LNmTF$r8AYWAQL$S-NH₂ | 1378 | 1545.86 | 773.93 | 774.11 |
| 665 | Ac-LSarF$r8AYWAQL$S-NH₂ | 1379 | 1501.83 | 751.92 | 752.18 |
| 667 | Ac-LGF$r8AYWAQL$S-NH₂ | 1380 | 1487.82 | 744.91 | 745.15 |
| 668 | Ac-LTNmF$r8AYWAQL$S-NH₂ | 1381 | 1545.86 | 773.93 | 774.2 |
| 669 | Ac-TF$r8AYWAQL$S-NH₂ | 1382 | 1418.76 | 710.38 | 710.64 |
| 670 | Ac-ETF$r8AYWAQL$A-NH₂ | 1383 | 1531.81 | 766.91 | 767.2 |
| 671 | Ac-LTF$r8EYWAQL$A-NH₂ | 1384 | 1573.85 | 787.93 | 788.1 |
| 672 | Ac-LT2Nal$r8AYWSQL$S-NH₂ | 1385 | 1597.85 | 799.93 | 800.4 |
| 673 | Ac-LTF$r8AYWAAL$S-NH₂ | 1386 | 1474.82 | 738.41 | 738.68 |
| 674 | Ac-LTF$r8AYWAQhCha$S-NH₂ | 1387 | 1585.89 | 793.95 | 794.19 |
| 675 | Ac-LTF$r8AYWAQChg$S-NH₂ | 1388 | 1557.86 | 779.93 | 780.97 |
| 676 | Ac-LTF$r8AYWAQCba$S-NH₂ | 1389 | 1543.84 | 772.92 | 773.19 |
| 677 | Ac-LTF$r8AYWAQF3CF3$S-NH₂ | 1390 | 1633.82 | 817.91 | 818.15 |
| 678 | Ac-LTF$r8AYWAQ1Nal$S-NH₂ | 1391 | 1615.84 | 808.92 | 809.18 |
| 679 | Ac-LTF$r8AYWAQBip$S-NH₂ | 1392 | 1641.86 | 821.93 | 822.32 |
| 680 | Ac-LT2Nal$r8AYWAQL$S-NH₂ | 1393 | 1581.86 | 791.93 | 792.15 |
| 681 | Ac-LTF$r8AYWVQL$S-NH₂ | 1394 | 1559.88 | 780.94 | 781.62 |
| 682 | Ac-LTF$r8AWWAQL$S-NH₂ | 1395 | 1554.86 | 778.43 | 778.65 |
| 683 | Ac-FTF$r8VYWSQL$S-NH₂ | 1396 | 1609.85 | 805.93 | 806.12 |
| 684 | Ac-ITF$r8FYWAQL$S-NH₂ | 1397 | 1607.88 | 804.94 | 805.2 |
| 685 | Ac-ITF$r8LYWSQL$S-NH₂ | 1398 | 1589.89 | 795.95 | 796.22 |
| 686 | Ac-FTF$r8FYWAQL$S-NH₂ | 1399 | 1641.86 | 821.93 | 822.41 |
| 687 | Ac-VTF$r8AYWSQL$S-NH₂ | 1400 | 1533.82 | 767.91 | 768.19 |
| 688 | Ac-LTF$r8AHWAQL$S-NH₂ | 1401 | 1505.84 | 753.92 | 754.31 |
| 689 | Ac-LTF$r8AYWAQL$H-NH₂ | 1402 | 1581.87 | 791.94 | 791.94 |
| 690 | Ac-LTF$r8AYWAHL$S-NH₂ | 1403 | 1540.84 | 771.42 | 771.61 |
| 691 | Ac-aAibWTF$r8VYWSQL$S-NH₂ | 1404 | 1804.96 | 903.48 | 903.9 |
| 692 | Ac-AibWTF$r8HYWAQL$S-NH₂ | 1405 | 1755.91 | 878.96 | 879.5 |
| 693 | Ac-AibAWTF$r8HYWAQL$S-NH₂ | 1406 | 1826.95 | 914.48 | 914.7 |
| 694 | Ac-fWTF$r8HYWAQL$S-NH₂ | 1407 | 1817.93 | 909.97 | 910.2 |
| 695 | Ac-AibWWTF$r8HYWAQL$S-NH₂ | 1408 | 1941.99 | 972.00 | 972.7 |
| 696 | Ac-WTF$r8LYWSQL$S-NH₂ | 1409 | 1662.88 | 832.44 | 832.7 |
| 697 | Ac-WTF$r8NleYWSQL$S-NH₂ | 1410 | 1662.88 | 832.44 | 832.7 |
| 698 | Ac-LTF$r8AYWSQL$a-NH₂ | 1411 | 1531.84 | 766.92 | 767.2 |
| 699 | Ac-LTF$r8EYWARL$A-NH₂ | 1412 | 1601.90 | 801.95 | 802.2 |
| 700 | Ac-LTF$r8EYWAHL$A-NH₂ | 1413 | 1582.86 | 792.43 | 792.6 |
| 701 | Ac-aTF$r8AYWAQL$S-NH₂ | 1414 | 1489.80 | 745.90 | 746.1 |
| 702 | Ac-AibTF$r8AYWAQL$S-NH₂ | 1415 | 1503.81 | 752.91 | 753.2 |
| 703 | Ac-AmfTF$r8AYWAQL$S-NH₂ | 1416 | 1579.84 | 790.92 | 791.2 |
| 704 | Ac-AmwTF$r8AYWAQL$S-NH₂ | 1417 | 1618.86 | 810.43 | 810.7 |
| 705 | Ac-NmLTF$r8AYWAQL$S-NH₂ | 1418 | 1545.86 | 773.93 | 774.1 |
| 706 | Ac-LNmTF$r8AYWAQL$S-NH₂ | 1419 | 1545.86 | 773.93 | 774.4 |
| 707 | Ac-LSarF$r8AYWAQL$S-NH₂ | 1420 | 1501.83 | 751.92 | 752.1 |
| 708 | Ac-TF$r8AYWAQL$S-NH₂ | 1421 | 1418.76 | 710.38 | 710.8 |
| 709 | Ac-ETF$r8AYWAQL$A-NH₂ | 1422 | 1531.81 | 766.91 | 767.4 |
| 710 | Ac-LTF$r8EYWAQL$A-NH₂ | 1423 | 1573.85 | 787.93 | 788.2 |
| 711 | Ac-WTF$r8VYWSQL$S-NH₂ | 1424 | 1648.87 | 825.44 | 825.2 |
| 713 | Ac-YTF$r8FYWSQL$S-NH₂ | 1425 | 1673.85 | 837.93 | 837.3 |
| 714 | Ac-F$r8AY6clWSAL$A-NH₂ | 1426 | 1294.65 | 648.33 | 647.74 |
| 715 | Ac-ETF$r8EYWVQL$S-NH₂ | 1427 | 1633.84 | 817.92 | 817.36 |
| 716 | Ac-ETF$r8EHWAQL$A-NH₂ | 1428 | 1563.81 | 782.91 | 782.36 |
| 717 | Ac-ITF$r8EYWAQL$S-NH₂ | 1429 | 1589.85 | 795.93 | 795.38 |
| 718 | Ac-ITF$r8EHWVQL$A-NH₂ | 1430 | 1575.88 | 788.94 | 788.42 |
| 719 | Ac-ITF$r8EHWAQL$S-NH₂ | 1431 | 1563.85 | 782.93 | 782.43 |
| 720 | Ac-LTF4F$r8AYWAQCba$S-NH₂ | 1432 | 1561.83 | 781.92 | 781.32 |
| 721 | Ac-LTF3Cl$r8AYWAQhL$S-NH₂ | 1433 | 1579.82 | 790.91 | 790.64 |
| 722 | Ac-LTF3Cl$r8AYWAQCha$S-NH₂ | 1434 | 1605.84 | 803.92 | 803.37 |
| 723 | Ac-LTF3Cl$r8AYWAQChg$S-NH₂ | 1435 | 1591.82 | 796.91 | 796.27 |
| 724 | Ac-LTF3Cl$r8AYWAQCba$S-NH₂ | 1436 | 1577.81 | 789.91 | 789.83 |
| 725 | Ac-LTF$r8AY6clWSQL$S-NH₂ | 1437 | 1581.80 | 791.90 | 791.75 |
| 726 | Ac-LTF4F$r8HYWAQhL$S-NH₂ | 1438 | 1629.87 | 815.94 | 815.36 |
| 727 | Ac-LTF4F$r8HYWAQCba$S-NH₂ | 1439 | 1627.86 | 814.93 | 814.32 |
| 728 | Ac-LTF4F$r8AYWAQhL$S-NH₂ | 1440 | 1563.85 | 782.93 | 782.36 |
| 729 | Ac-LTF4F$r8AYWAQChg$S-NH₂ | 1441 | 1575.85 | 788.93 | 788.35 |
| 730 | Ac-ETF$r8EYWVAL$S-NH₂ | 1442 | 1576.82 | 789.41 | 788.79 |
| 731 | Ac-ETF$r8EHWAAL$A-NH₂ | 1443 | 1506.79 | 754.40 | 754.8 |
| 732 | Ac-ITF$r8EYWAAL$S-NH₂ | 1444 | 1532.83 | 767.42 | 767.75 |
| 733 | Ac-ITF$r8EHWVAL$A-NH₂ | 1445 | 1518.86 | 760.43 | 760.81 |
| 734 | Ac-ITF$r8EHWAAL$S-NH₂ | 1446 | 1506.82 | 754.41 | 754.8 |
| 735 | Pam-LTF$r8EYWAQL$S-NH₂ | 1447 | 1786.07 | 894.04 | 894.48 |
| 736 | Pam-ETF$r8EYWAQL$S-NH₂ | 1448 | 1802.03 | 902.02 | 902.34 |
| 737 | Ac-LTF$r8AYWLQL$S-NH₂ | 1449 | 1573.89 | 787.95 | 787.39 |
| 738 | Ac-LTF$r8EYWLQL$S-NH₂ | 1450 | 1631.90 | 816.95 | 817.33 |
| 739 | Ac-LTF$r8EHWLQL$S-NH₂ | 1451 | 1605.89 | 803.95 | 804.29 |
| 740 | Ac-LTF$r8VYWAQL$S-NH₂ | 1452 | 1559.88 | 780.94 | 781.34 |
| 741 | Ac-LTF$r8AYWSQL$S-NH₂ | 1453 | 1547.84 | 774.92 | 775.33 |
| 742 | Ac-ETF$r8AYWAQL$S-NH₂ | 1454 | 1547.80 | 774.90 | 775.7 |
| 743 | Ac-LTF$r8EYWAQL$S-NH₂ | 1455 | 1589.85 | 795.93 | 796.33 |
| 744 | Ac-LTF$r8HYWAQL$S-NHAm | 1456 | 1667.94 | 834.97 | 835.37 |
| 745 | Ac-LTF$r8HYWAQL$S-NHiAm | 1457 | 1667.94 | 834.97 | 835.27 |
| 746 | Ac-LTF$r8HYWAQL$S-NHnPr3Ph | 1458 | 1715.94 | 858.97 | 859.42 |
| 747 | Ac-LTF$r8HYWAQL$S-NHnBu3,3Me | 1459 | 1681.96 | 841.98 | 842.67 |
| 748 | Ac-LTF$r8HYWAQL$S-NHnBu | 1460 | 1653.93 | 827.97 | 828.24 |
| 749 | Ac-LTF$r8HYWAQL$S-NHnPr | 1461 | 1639.91 | 820.96 | 821.31 |
| 750 | Ac-LTF$r8HYWAQL$S-NHnEt2Ch | 1462 | 1707.98 | 854.99 | 855.35 |
| 751 | Ac-LTF$r8HYWAQL$S-NHHex | 1463 | 1681.96 | 841.98 | 842.4 |
| 752 | Ac-LTF$r8AYWAQL$S-NHmdPeg2 | 1464 | 1633.91 | 817.96 | 855.35 |
| 753 | Ac-LTF$r8AYWAQL$A-NHmdPeg2 | 1465 | 1617.92 | 809.96 | 810.58 |
| 754 | Ac-LTF$r5AYWAAL$s8S-NH₂ | 1466 | 1474.82 | 738.41 | 738.79 |
| 755 | Ac-LTF$r8AYWCouQL$S-NH₂ | 1467 | 1705.88 | 853.94 | 854.61 |
| 756 | Ac-LTF$r8CouYWAQL$S-NH₂ | 1468 | 1705.88 | 853.94 | 854.7 |
| 757 | Ac-CouTF$r8AYWAQL$S-NH₂ | 1469 | 1663.83 | 832.92 | 833.33 |
| 758 | H-LTF$r8AYWAQL$A-NH₂ | 1470 | 1473.84 | 737.92 | 737.29 |
| 759 | Ac-HHF$r8AYWAQL$S-NH₂ | 1471 | 1591.83 | 796.92 | 797.72 |
| 760 | Ac-LT2Nal$r8AYWSQL$S-NH₂ | 1472 | 1597.85 | 799.93 | 800.68 |
| 761 | Ac-LTF$r8HCouWAQL$S-NH₂ | 1473 | 1679.87 | 840.94 | 841.38 |
| 762 | Ac-LTF$r8AYWCou2QL$S-NH₂ | 1474 | 1789.94 | 895.97 | 896.51 |
| 763 | Ac-LTF$r8Cou2YWAQL$S-NH₂ | 1475 | 1789.94 | 895.97 | 896.5 |
| 764 | Ac-Cou2TF$r8AYWAQL$S-NH₂ | 1476 | 1747.90 | 874.95 | 875.42 |
| 765 | Ac-LTF$r8ACou2WAQL$S-NH₂ | 1477 | 1697.92 | 849.96 | 850.82 |
| 766 | Dmaac-LTF$r8AYWAQL$S-NH₂ | 1478 | 1574.89 | 788.45 | 788.82 |
| 767 | Hexac-LTF$r8AYWAQL$S-NH₂ | 1479 | 1587.91 | 794.96 | 795.11 |
| 768 | Napac-LTF$r8AYWAQL$S-NH₂ | 1480 | 1657.89 | 829.95 | 830.36 |
| 769 | Pam-LTF$r8AYWAQL$S-NH₂ | 1481 | 1728.06 | 865.03 | 865.45 |
| 770 | Ac-LT2Nal$r8HYAAQL$S-NH₂ | 1482 | 1532.84 | 767.42 | 767.61 |
| 771 | Ac-LT2Nal$/r8HYWAQL$/S-NH₂ | 1483 | 1675.91 | 838.96 | 839.1 |
| 772 | Ac-LT2Nal$r8HYFAQL$S-NH₂ | 1484 | 1608.87 | 805.44 | 805.9 |
| 773 | Ac-LT2Nal$r8HWAAQL$S-NH₂ | 1485 | 1555.86 | 778.93 | 779.08 |
| 774 | Ac-LT2Nal$r8HYAWQL$S-NH₂ | 1486 | 1647.88 | 824.94 | 825.04 |
| 775 | Ac-LT2Nal$r8HYAAQW$S-NH₂ | 1487 | 1605.83 | 803.92 | 804.05 |
| 776 | Ac-LTW$r8HYWAQL$S-NH₂ | 1488 | 1636.88 | 819.44 | 819.95 |
| 777 | Ac-LT1Nal$r8HYWAQL$S-NH₂ | 1489 | 1647.88 | 824.94 | 825.41 |

[0553] TABLE 2c shows examples of crosslinked and non-crosslinked polypeptides comprising D-amino acids.

TABLE 2c

| | | SEQ | | Exact | Found | Calc | Calc | Calc |
|---|---|---|---|---|---|---|---|---|
| SP | Sequence | ID NO: | Isomer | Mass | Mass | (M + 1)/1 | (M + 2)/2 | (M + 3)/3 |
| 765 | Ac-tawyanfekllr-NH2 | 1490 | z | z | 777.46 | z | z | z |
| 766 | Ac-tawyanf4CF3ekllr-NH2 | 1491 | | | 811.41 | | | |

### Example 3: Synthesis of Triazole-Crosslinked Peptidomimetic Macrocycles

[0554] In a typical example for the preparation of a peptidomimetic macrocycle comprising a 1,4-triazole group (e.g. SP153), 20% (v/v) 2,6-lutidine in DMF was added to the peptide resin (0.5 mmol) in a 40 ml glass vial and shaken for 10 minutes. Sodium ascorbate (0.25 g, 1.25 mmol) and diisopropylethylamine (0.22 ml, 1.25 mmol) were then added, followed by copper(I) iodide (0.24 g, 1.25 mmol) and the resulting reaction mixture was mechanically shaken 16 hours at ambient temperature.

[0555] In a typical example for the preparation of a peptidomimetic macrocycle comprising a 1,5-triazole group (SP932, SP933), a peptide resin (0.25 mmol) was washed with anhydrous DCM. Resin was loaded into a microwave vial. Vessel was evacuated and purged with nitrogen. Chloro(pentamethylcyclopentadienyl) bis(triphenylphosphine)ruthenium(II), 10% loading, (Strem 44-0117) was added. Anhydrous toluene was added to the reaction vessel. The reaction was then loaded into the microwave and held at 90° C. for 10 minutes. Reaction may need to be pushed a subsequent time for completion. In other cases, Chloro(1,5-cyclooctadiene)(pentamethylcyclopentadienyl)ruthenium (“Cp*RuCl(cod)”) may be used, for example at room temperature in a solvent comprising toluene.

[0556] In a typical example for the preparation of a peptidomimetic macrocycle comprising an iodo-substituted triazole group (e.g. SP457), THF (2 ml) was added to the peptide resin (0.05 mmol) in a 40 ml glass vial and shaken for 10 minutes. N-bromosuccimide (0.04 g, 0.25 mmol), copper(I) iodide (0.05 g, 0.25 mmol) and diisopropylethylamine (0.04 ml, 0.25 mmol) were then added and the resulting reaction mixture was mechanically shaken 16 hours at ambient temperature. Iodo-triazole crosslinkers may be further substituted by a coupling reaction, for example with boronic acids, to result in a peptidomimetic macrocycle such as SP465. In a typical example, DMF (3 ml) was added to the iodo-triazole peptide resin (0.1 mmol) in a 40 ml glass vial and shaken for 10 minutes. Phenyl boronic acid (0.04 g, 0.3 mmol), tetrakis(triphenylphosphine)palladium(0) (0.006 g, 0.005 mmol) and potassium carbonate (0.083 g, 0.6 mmol) were then added and the resulting reaction mixture was mechanically shaken 16 hours at 70° C. Iodo-triazole crosslinkers may also be further substituted by a coupling reaction, for example with a terminal alkyne (e.g. Sonogashira coupling), to result in a peptidomimetic macrocycle such as SP468. In a typical example, 2:1 THF:triethylamine (3 ml) was added to the iodo-triazole peptide resin (0.1 mmol) in a 40 ml glass vial and shaken for 10 minutes. N—BOC-4-pentyne-1-amine (0.04 g, 0.2 mmol) and bis(triphenylphosphine)palladiumchloride (0.014 g, 0.02 mmol) were added and shaken for 5 minutes. Copper(I) iodide (0.004 g, 0.02 mmol) was then added and the resulting reaction mixture was mechanically shaken 16 hours at 70° C.

[0557] The triazole-cyclized resin-bound peptides were deprotected and cleaved from the solid support by treatment with TFA/H₂O/TIS (95/5/5 v/v) for 2.5 h at room temperature. After filtration of the resin the TFA solution was precipitated in cold diethyl ether and centrifuged to yield the desired product as a solid. The crude product was purified by preparative HPLC. For example, purification of cross-linked compounds is achieved by high performance liquid chromatography (HPLC) (Varian ProStar) on a reverse phase C18 column (Varian) to yield the pure compounds. Chemical composition of the pure products is confirmed by LC/MS mass spectrometry (Micromass LCT interfaced with Agilent 1100 HPLC system) and amino acid analysis (Applied Biosystems, model 420A).

[0558] TABLE 3 and TABLE 3A show lists of peptidomimetic macrocycles of Formula I.

TABLE 3

| | SEQ | |
|---|---|---|
| SP- | ID NO: | Sequence |
| 778 | 1492 | Ac-F$4rn6AYWEAc3cL$4a5AAA-NH2 |
| 779 | 1493 | Ac-F$4rn6AYWEAc3cL$4a5AAibA-NH2 |
| 780 | 1494 | Ac-LTF$4rn6AYWAQL$4a5SANle-NH2 |
| 781 | 1495 | Ac-LTF$4rn6AYWAQL$4a5SAL-NH2 |
| 782 | 1496 | Ac-LTF$4rn6AYWAQL$4a5SAM-NH2 |
| 783 | 1497 | Ac-LTF$4rn6AYWAQL$4a5SAhL-NH2 |
| 784 | 1498 | Ac-LTF$4rn6AYWAQL$4a5SAF-NH2 |
| 785 | 1499 | Ac-LTF$4rn6AYWAQL$4a5SAI-NH2 |
| 786 | 1500 | Ac-LTF$4rn6AYWAQL$4a5SAChg-NH2 |
| 787 | 1501 | Ac-LTF$4rn6AYWAQL$4a5SAAib-NH2 |
| 788 | 1502 | Ac-LTF$4rn6AYWAQL$4a5SAA-NH2 |
| 789 | 1503 | Ac-LTF$4rn6AYWA$4a5L$S$Nle-NH2 |
| 790 | 1504 | Ac-LTF$4rn6AYWA$4a5L$S$A-NH2 |
| 791 | 1505 | Ac-F$4rn6AYWEAc3cL$4a5AANle-NH2 |
| 792 | 1506 | Ac-F$4rn6AYWEAc3cL$4a5AAL-NH2 |
| 793 | 1507 | Ac-F$4rn6AYWEAc3cL$4a5AAM-NH2 |
| 794 | 1508 | Ac-F$4rn6AYWEAc3cL$4a5AAhL-NH2 |
| 795 | 1509 | Ac-F$4rn6AYWEAc3cL$4a5AAF-NH2 |
| 796 | 1510 | Ac-F$4rn6AYWEAc3cL$4a5AAI-NH2 |
| 797 | 1511 | Ac-F$4rn6AYWEAc3cL$4a5AAChg-NH2 |
| 798 | 1512 | Ac-F$4rn6AYWEAc3cL$4a5AACha-NH2 |
| 799 | 1513 | Ac-F$4rn6AYWEAc3cL$4a5AAAib-NH2 |
| 800 | 1514 | Ac-LTF$4rn6AYWAQL$4a5AAAibV-NH2 |
| 801 | 1515 | Ac-LTF$4rn6AYWAQL$4a5AAAibV-NH2 |
| 802 | 1516 | Ac-LTF$4rn6AYWAQL$4a5SAibAA-NH2 |
| 803 | 1517 | Ac-LTF$4rn6AYWAQL$4a5SAibAA-NH2 |
| 804 | 1518 | Ac-HLTF$4rn6HHWHQL$4a5AANleNle-NH2 |
| 805 | 1519 | Ac-DLTF$4rn6HHWHQL$4a5RRLV-NH2 |
| 806 | 1520 | Ac-HHTF$4rn6HHWHQL$4a5AAML-NH2 |
| 807 | 1521 | Ac-F$4rn6HHWHQL$4a5RRDCha-NH2 |
| 808 | 1522 | Ac-F$4rn6HHWHQL$4a5HRFV-NH2 |
| 809 | 1523 | Ac-HLTF$4rn6HHWHQL$4a5AAhLA-NH2 |
| 810 | 1524 | Ac-DLTF$4rn6HHWHQL$4a5RRChgl-NH2 |
| 811 | 1525 | Ac-DLTF$4rn6HHWHQL$4a5RRChgl-NH2 |
| 812 | 1526 | Ac-HHTF$4rn6HHWHQL$4a5AAChav-NH2 |
| 813 | 1527 | Ac-F$4rn6HHWHQL$4a5RRDa-NH2 |
| 814 | 1528 | Ac-F$4rn6HHWHQL$4a5HRAibG-NH2 |
| 815 | 1529 | Ac-F$4rn6AYWAQL$4a5HHNleL-NH2 |
| 816 | 1530 | Ac-F$4rn6AYWSAL$4a5HQANle-NH2 |
| 817 | 1531 | Ac-F$4rn6AYWVQL$4a5QHChgl-NH2 |
| 818 | 1532 | Ac-F$4rn6AYWTAL$4a5QQNlev-NH2 |
| 819 | 1533 | Ac-F$4rn6AYWYQL$4a5HAibAa-NH2 |
| 820 | 1534 | Ac-LTF$4rn6AYWAQL$4a5HHLa-NH2 |
| 821 | 1535 | Ac-LTF$4rn6AYWAQL$4a5HHLa-NH2 |
| 822 | 1536 | Ac-LTF$4rn6AYWAQL$4a5HQNlev-NH2 |
| 823 | 1537 | Ac-LTF$4rn6AYWAQL$4a5HQNlev-NH2 |
| 824 | 1538 | Ac-LTF$4rn6AYWAQL$4a5QQMl-NH2 |
| 825 | 1539 | Ac-LTF$4rn6AYWAQL$4a5QQMl-NH2 |
| 826 | 1540 | Ac-LTF$4rn6AYWAQL$4a5HAibhLV-NH2 |
| 827 | 1541 | Ac-LTF$4rn6AYWAQL$4a5AHFA-NH2 |
| 828 | 1542 | Ac-HLTF$4rn6HHWHQL$4a5AANlel-NH2 |
| 829 | 1543 | Ac-DLTF$4rn6HHWHQL$4a5RRLa-NH2 |
| 830 | 1544 | Ac-HHTF$4rn6HHWHQL$4a5AAMv-NH2 |
| 831 | 1545 | Ac-F$4rn6HHWHQL$4a5RRDA-NH2 |
| 832 | 1546 | Ac-F$4rn6HHWHQL$4a5HRFCha-NH2 |
| 833 | 1547 | Ac-F$4rn6AYWEAL$4a5AA-NHAm |
| 834 | 1548 | Ac-F$4rn6AYWEAL$4a5AA-NHiAm |
| 835 | 1549 | Ac-F$4rn6AYWEAL$4a5AA-NHnPr3Ph |
| 836 | 1550 | Ac-F$4rn6AYWEAL$4a5AA-NHnBu33Me |
| 837 | 1551 | Ac-F$4rn6AYWEAL$4a5AA-NHnPr |
| 838 | 1552 | Ac-F$4rn6AYWEAL$4a5AA-NHnEt2Ch |
| 839 | 1553 | Ac-F$4rn6AYWEAL$4a5AA-NHnEt2Cp |
| 840 | 1554 | Ac-F$4rn6AYWEAL$4a5AA-NHHex |
| 841 | 1555 | Ac-LTF$4rn6AYWAQL$4a5AAIA-NH2 |
| 842 | 1556 | Ac-LTF$4rn6AYWAQL$4a5AAIA-NH2 |
| 843 | 1557 | Ac-LTF$4rn6AYWAAL$4a5AAMA-NH2 |
| 844 | 1558 | Ac-LTF$4rn6AYWAAL$4a5AAMA-NH2 |
| 845 | 1559 | Ac-LTF$4rn6AYWAQL$4a5AAIa-NH2 |
| 846 | 1560 | Ac-LTF$4rn6AYWAQL$4a5AAIa-NH2 |
| 847 | 1561 | Ac-LTF$4rn6AYWAAL$4a5AAMa-NH2 |
| 848 | 1562 | Ac-LTF$4rn6AYWAAL$4a5AAMa-NH2 |
| 849 | 1563 | Ac-LTF$4rn6AYWAAL$4a5AAIv-NH2 |
| 850 | 1564 | Ac-LTF$4rn6AYWAAL$4a5AAIv-NH2 |
| 851 | 1565 | Ac-LTF$4rn6AYWAQL$4a5AAMv-NH2 |
| 852 | 1566 | Ac-LTF$4rn6AYWAAL$4a5AANlev-NH2 |
| 853 | 1567 | Ac-LTF$4rn6AYWAAL$4a5AANlev-NH2 |
| 854 | 1568 | Ac-LTF$4rn6AYWAQL$4a5AAIl-NH2 |
| 855 | 1569 | Ac-LTF$4rn6AYWAQL$4a5AAIl-NH2 |
| 856 | 1570 | Ac-LTF$4rn6AYWAAL$4a5AAMl-NH2 |
| 857 | 1571 | Ac-LTF$4rn6AYWAQL$4a5AANlel-NH2 |
| 858 | 1572 | Ac-LTF$4rn6AYWAQL$4a5AANlel-NH2 |
| 859 | 1573 | Ac-F$4rn6AYWEAL$4a5AAMA-NH2 |
| 860 | 1574 | Ac-F$4rn6AYWEAL$4a5AANleA-NH2 |
| 861 | 1575 | Ac-F$4rn6AYWEAL$4a5AAIa-NH2 |
| 862 | 1576 | Ac-F$4rn6AYWEAL$4a5AAMa-NH2 |
| 863 | 1577 | Ac-F$4rn6AYWEAL$4a5AANlea-NH2 |
| 864 | 1578 | Ac-F$4rn6AYWEAL$4a5AAIv-NH2 |
| 865 | 1579 | Ac-F$4rn6AYWEAL$4a5AAMv-NH2 |
| 866 | 1580 | Ac-F$4rn6AYWEAL$4a5AANlev-NH2 |
| 867 | 1581 | Ac-F$4rn6AYWEAL$4a5AAIl-NH2 |
| 868 | 1582 | Ac-F$4rn6AYWEAL$4a5AAMl-NH2 |
| 869 | 1583 | Ac-F$4rn6AYWEAL$4a5AANlel-NH2 |
| 870 | 1584 | Ac-F$4rn6AYWEAL$4a5AANlel-NH2 |
| 871 | 1585 | Ac-LTF$4rn6AY6clWAQL$4a5SAA-NH2 |
| 872 | 1586 | Ac-LTF$4rn6AY6clWAQL$4a5SAA-NH2 |
| 873 | 1587 | Ac-WTF$4rn6FYWSQL$4a5AVAa-NH2 |
| 874 | 1588 | Ac-WTF$4rn6FYWSQL$4a5AVAa-NH2 |
| 875 | 1589 | Ac-WTF$4rn6VYWSQL$4a5AVA-NH2 |
| 876 | 1590 | Ac-WTF$4rn6VYWSQL$4a5AVA-NH2 |
| 877 | 1591 | Ac-WTF$4rn6FYWSQL$4a5SAAa-NH2 |
| 878 | 1592 | Ac-WTF$4rn6FYWSQL$4a5SAAa-NH2 |
| 879 | 1593 | Ac-WTF$4rn6VYWSQL$4a5AVAaa-NH2 |
| 880 | 1594 | Ac-WTF$4rn6VYWSQL$4a5AVAaa-NH2 |
| 881 | 1595 | Ac-LTF$4rn6AYWAQL$4a5AVG-NH2 |
| 882 | 1596 | Ac-LTF$4rn6AYWAQL$4a5AVG-NH2 |
| 883 | 1597 | Ac-LTF$4rn6AYWAQL$4a5AVQ-NH2 |
| 884 | 1598 | Ac-LTF$4rn6AYWAQL$4a5AVQ-NH2 |
| 885 | 1599 | Ac-LTF$4rn6AYWAQL$4a5SAa-NH2 |
| 886 | 1600 | Ac-LTF$4rn6AYWAQL$4a5SAa-NH2 |
| 887 | 1601 | Ac-LTF$4rn6AYWAQhL$4a5SAA-NH2 |
| 888 | 1602 | Ac-LTF$4rn6AYWAQhL$4a5SAA-NH2 |
| 889 | 1603 | Ac-LTF$4rn6AYWEQLStSA$4a5-NH2 |
| 890 | 1604 | Ac-LTF$4rn6AYWAQL$4a5SLA-NH2 |
| 891 | 1605 | Ac-LTF$4rn6AYWAQL$4a5SLA-NH2 |
| 892 | 1606 | Ac-LTF$4rn6AYWAQL$4a5SWA-NH2 |
| 893 | 1607 | Ac-LTF$4rn6AYWAQL$4a5SWA-NH2 |
| 894 | 1608 | Ac-LTF$4rn6AYWAQL$4a5SVS-NH2 |
| 895 | 1609 | Ac-LTF$4rn6AYWAQL$4a5SAS-NH2 |
| 896 | 1610 | Ac-LTF$4rn6AYWAQL$4a5SVG-NH2 |
| 897 | 1611 | Ac-ETF$4rn6VYWAQL$4a5SAa-NH2 |
| 898 | 1612 | Ac-ETF$4rn6VYWAQL$4a5SAA-NH2 |
| 899 | 1613 | Ac-ETF$4rn6VYWAQL$4a5SVA-NH2 |
| 900 | 1614 | Ac-ETF$4rn6VYWAQL$4a5SLA-NH2 |
| 901 | 1615 | Ac-ETF$4rn6VYWAQL$4a5SWA-NH2 |
| 902 | 1616 | Ac-ETF$4rn6KYWAQL$4a5SWA-NH2 |
| 903 | 1617 | Ac-ETF$4rn6VYWAQL$4a5SVS-NH2 |
| 904 | 1618 | Ac-ETF$4rn6VYWAQL$4a5SAS-NH2 |
| 905 | 1619 | Ac-ETF$4rn6VYWAQL$4a5SVG-NH2 |
| 906 | 1620 | Ac-LTF$4rn6VYWAQL$4a5SSa-NH2 |
| 907 | 1621 | Ac-ETF$4rn6VYWAQL$4a5SSa-NH2 |
| 908 | 1622 | Ac-LTF$4rn6VYWAQL$4a5SNa-NH2 |
| 909 | 1623 | Ac-ETF$4rn6VYWAQL$4a5SNa-NH2 |
| 910 | 1624 | Ac-LTF$4rn6VYWAQL$4a5SAa-NH2 |
| 911 | 1625 | Ac-LTF$4rn6VYWAQL$4a5SVA-NH2 |
| 912 | 1626 | Ac-LTF$4rn6VYWAQL$4a5SVA-NH2 |
| 913 | 1627 | Ac-LTF$4rn6VYWAQL$4a5SWA-NH2 |
| 914 | 1628 | Ac-LTF$4rn6VYWAQL$4a5SVS-NH2 |
| 915 | 1629 | Ac-LTF$4rn6VYWAQL$4a5SVS-NH2 |
| 916 | 1630 | Ac-LTF$4rn6VYWAQL$4a5SAS-NH2 |
| 917 | 1631 | Ac-LTF$4rn6VYWAQL$4a5SAS-NH2 |
| 918 | 1632 | Ac-LTF$4rn6VYWAQL$4a5SVG-NH2 |
| 919 | 1633 | Ac-LTF$4rn6VYWAQL$4a5SVG-NH2 |
| 920 | 1634 | Ac-LTF$4rn6EYWAQCha$4a5SAA-NH2 |
| 921 | 1635 | Ac-LTF$4rn6EYWAQCha$4a5SAA-NH2 |
| 922 | 1636 | Ac-LTF$4rn6EYWAQCpg$4a5SAA-NH2 |
| 923 | 1637 | Ac-LTF$4rn6EYWAQCpg$4a5SAA-NH2 |
| 924 | 1638 | Ac-LTF$4rn6EYWAQF$4a5SAA-NH2 |
| 925 | 1639 | Ac-LTF$4rn6EYWAQF$4a5SAA-NH2 |
| 926 | 1640 | Ac-LTF3Cl$4rn6EYWAQL$4a5SAA-NH2 |
| 927 | 1641 | Ac-LTF3Cl$4rn6EYWAQL$4a5SAA-NH2 |
| 928 | 1642 | Ac-LTF34F2$4rn6EYWAQL$4a5SAA-NH2 |
| 929 | 1643 | Ac-LTF34F2$4rn6EYWAQL$4a5SAA-NH2 |
| 930 | 1644 | Ac-LTF34F2$4rn6EYWAQhL$4a5SAA-NH2 |
| 931 | 1645 | Ac-LTF34F2$4rn6EYWAQhL$4a5SAA-NH2 |
| 932 | 1646 | Ac-ETF$4rn6EYWAQL$4a5SAA-NH2 |
| 933 | 1647 | Ac-LTF$4rn6AYWVQL$4a5SAA-NH2 |
| 934 | 1648 | Ac-LTF$4rn6AHWAQL$4a5SAA-NH2 |
| 935 | 1649 | Ac-LTF$4rn6AEWAQL$4a5SAA-NH2 |
| 936 | 1650 | Ac-LTF$4rn6ASWAQL$4a5SAA-NH2 |
| 937 | 1651 | Ac-LTF$4rn6AEWAQL$4a5SAA-NH2 |
| 938 | 1652 | Ac-LTF$4rn6ASWAQL$4a5SAA-NH2 |
| 939 | 1653 | Ac-LTF$4rn6AF4coohWAQL$4a5SAA-NH2 |
| 940 | 1654 | Ac-LTF$4rn6AF4coohWAQL$4a5SAA-NH2 |
| 941 | 1655 | Ac-LTF$4rn6AHWAQL$4a5AAIa-NH2 |
| 942 | 1656 | Ac-ITF$4rn6FYWAQL$4a5AAIa-NH2 |
| 943 | 1657 | Ac-ITF$4rn6EHWAQL$4a5AAIa-NH2 |
| 944 | 1658 | Ac-ITF$4rn6EHWAQL$4a5AAIa-NH2 |
| 945 | 1659 | Ac-ETF$4rn6EHWAQL$4a5AAIa-NH2 |
| 946 | 1660 | Ac-ETF$4rn6EHWAQL$4a5AAIa-NH2 |
| 947 | 1661 | Ac-LTF$4rn6AHWVQL$4a5AAIa-NH2 |
| 948 | 1662 | Ac-ITF$4rn6FYWVQL$4a5AAIa-NH2 |
| 949 | 1663 | Ac-ITF$4rn6EYWVQL$4a5AAIa-NH2 |
| 950 | 1664 | Ac-ITF$4rn6EHWVQL$4a5AAIa-NH2 |
| 951 | 1665 | Ac-LTF$4rn6AEWAQL$4a5AAIa-NH2 |
| 952 | 1666 | Ac-LTF$4rn6AF4coohWAQL$4a5AAIa-NH2 |
| 953 | 1667 | Ac-LTF$4rn6AF4coohWAQL$4a5AAIa-NH2 |
| 954 | 1668 | Ac-LTF$4rn6AHWAQL$4a5AHFA-NH2 |
| 955 | 1669 | Ac-ITF$4rn6FYWAQL$4a5AHFA-NH2 |
| 956 | 1670 | Ac-ITF$4rn6FYWAQL$4a5AHFA-NH2 |
| 957 | 1671 | Ac-ITF$4rn6FHWAQL$4a5AEFA-NH2 |
| 958 | 1672 | Ac-ITF$4rn6FHWAQL$4a5AEFA-NH2 |
| 959 | 1673 | Ac-ITF$4rn6EHWAQL$4a5AHFA-NH2 |
| 960 | 1674 | Ac-ITF$4rn6EHWAQL$4a5AHFA-NH2 |
| 961 | 1675 | Ac-LTF$4rn6AHWVQL$4a5AHFA-NH2 |
| 962 | 1676 | Ac-ITF$4rn6FYWVQL$4a5AHFA-NH2 |
| 963 | 1677 | Ac-ITF$4rn6EYWVQL$4a5AHFA-NH2 |
| 964 | 1678 | Ac-ITF$4rn6EHWVQL$4a5AHFA-NH2 |
| 965 | 1679 | Ac-ITF$4rn6EHWVQL$4a5AHFA-NH2 |
| 966 | 1680 | Ac-ETF$4rn6EYWAAL$4a5SAA-NH2 |
| 967 | 1681 | Ac-LTF$4rn6AYWVAL$4a5SAA-NH2 |
| 968 | 1682 | Ac-LTF$4rn6AHWAAL$4a5SAA-NH2 |
| 969 | 1683 | Ac-LTF$4rn6AEWAAL$4a5SAA-NH2 |
| 970 | 1684 | Ac-LTF$4rn6AEWAAL$4a5SAA-NH2 |
| 971 | 1685 | Ac-LTF$4rn6ASWAAL$4a5SAA-NH2 |
| 972 | 1686 | Ac-LTF$4rn6ASWAAL$4a5SAA-NH2 |
| 973 | 1687 | Ac-LTF$4rn6AYWAAL$4a5AAIa-NH2 |
| 974 | 1688 | Ac-LTF$4rn6AYWAAL$4a5AAIa-NH2 |
| 975 | 1689 | Ac-LTF$4rn6AYWAAL$4a5AHFA-NH2 |
| 976 | 1690 | Ac-LTF$4rn6EHWAQL$4a5AHIa-NH2 |
| 977 | 1691 | Ac-LTF$4rn6EHWAQL$4a5AHIa-NH2 |
| 978 | 1692 | Ac-LTF$4rn6AHWAQL$4a5AHIa-NH2 |
| 979 | 1693 | Ac-LTF$4rn6EYWAQL$4a5AHIa-NH2 |
| 980 | 1694 | Ac-LTF$4rn6AYWAQL$4a5AAFa-NH2 |
| 981 | 1695 | Ac-LTF$4rn6AYWAQL$4a5AAFa-NH2 |
| 982 | 1696 | Ac-LTF$4rn6AYWAQL$4a5AAWa-NH2 |
| 983 | 1697 | Ac-LTF$4rn6AYWAQL$4a5AAVa-NH2 |
| 984 | 1698 | Ac-LTF$4rn6AYWAQL$4a5AAVa-NH2 |
| 985 | 1699 | Ac-LTF$4rn6AYWAQL$4a5AALa-NH2 |
| 986 | 1700 | Ac-LTF$4rn6AYWAQL$4a5AALa-NH2 |
| 987 | 1701 | Ac-LTF$4rn6EYWAQL$4a5AAIa-NH2 |
| 988 | 1702 | Ac-LTF$4rn6EYWAQL$4a5AAIa-NH2 |
| 989 | 1703 | Ac-LTF$4rn6EYWAQL$4a5AAFa-NH2 |
| 990 | 1704 | Ac-LTF$4rn6EYWAQL$4a5AAFa-NH2 |
| 991 | 1705 | Ac-LTF$4rn6EYWAQL$4a5AAVa-NH2 |
| 992 | 1706 | Ac-LTF$4rn6EYWAQL$4a5AAVa-NH2 |
| 993 | 1707 | Ac-LTF$4rn6EHWAQL$4a5AAIa-NH2 |
| 994 | 1708 | Ac-LTF$4rn6EHWAQL$4a5AAIa-NH2 |
| 995 | 1709 | Ac-LTF$4rn6EHWAQL$4a5AAWa-NH2 |
| 996 | 1710 | Ac-LTF$4rn6EHWAQL$4a5AAWa-NH2 |
| 997 | 1711 | Ac-LTF$4rn6EHWAQL$4a5AALa-NH2 |
| 998 | 1712 | Ac-LTF$4rn6EHWAQL$4a5AALa-NH2 |
| 999 | 1713 | Ac-ETF$4rn6EHWVQL$4a5AALa-NH2 |
| 1000 | 1714 | Ac-LTF$4rn6AYWAQL$4a5AAAa-NH2 |
| 1001 | 1715 | Ac-LTF$4rn6AYWAQL$4a5AAAa-NH2 |
| 1002 | 1716 | Ac-LTF$4rn6AYWAQL$4a5AAAibA-NH2 |
| 1003 | 1717 | Ac-LTF$4rn6AYWAQL$4a5AAAibA-NH2 |
| 1004 | 1718 | Ac-LTF$4rn6AYWAQL$4a5AAAAa-NH2 |
| 1005 | 1719 | Ac-LTF$r5AYWAQL$4a5s8AAIa-NH2 |
| 1006 | 1720 | Ac-LTF$r5AYWAQL$4a5s8SAA-NH2 |
| 1007 | 1721 | Ac-LTF$4rn6AYWAQCba$4a5AANleA-NH2 |
| 1008 | 1722 | Ac-ETF$4rn6AYWAQCba$4a5AANleA-NH2 |
| 1009 | 1723 | Ac-LTF$4rn6EYWAQCba$4a5AANleA-NH2 |
| 1010 | 1724 | Ac-LTF$4rn6AYWAQCba$4a5AWNleA-NH2 |
| 1011 | 1725 | Ac-ETF$4rn6AYWAQCba$4a5AWNleA-NH2 |
| 1012 | 1726 | Ac-LTF$4rn6EYWAQCba$4a5AWNleA-NH2 |
| 1013 | 1727 | Ac-LTF$4rn6EYWAQCba$4a5SAFA-NH2 |
| 1014 | 1728 | Ac-LTF34F2$4rn6EYWAQCba$4a5SANleA-NH2 |
| 1015 | 1729 | Ac-LTF$4rn6EF4coohWAQCba$4a5SANleA-NH2 |
| 1016 | 1730 | Ac-LTF$4rn6EYWSQCba$4a5SANleA-NH2 |
| 1017 | 1731 | Ac-LTF$4rn6EYWWQCba$4a5SANleA-NH2 |
| 1018 | 1732 | Ac-LTF$4rn6EYWAQCba$4a5AAIa-NH2 |
| 1019 | 1733 | Ac-LTF34F2$4rn6EYWAQCba$4a5AAIa-NH2 |
| 1020 | 1734 | Ac-LTF$4rn6EF4coohWAQCba$4a5AAIa-NH2 |
| 1021 | 1735 | Pam-ETF$4rn6EYWAQCba$4a5SAA-NH2 |
| 1022 | 1736 | Ac-LThF$4rn6EFWAQCba$4a5SAA-NH2 |
| 1023 | 1737 | Ac-LTF$4rn6EYAAQCba$4a5SAA-NH2 |
| 1024 | 1738 | Ac-LTF$4rn6EY2NalAQCba$4a5SAA-NH2 |
| 1025 | 1739 | Ac-LTF$4rn6AYWAQCba$4a5SAA-NH2 |
| 1026 | 1740 | Ac-LTF$4rn6EYWAQCba$4a5SAF-NH2 |
| 1027 | 1741 | Ac-LTF$4rn6EYWAQCba$4a5SAFa-NH2 |
| 1028 | 1742 | Ac-LTF$4rn6AYWAQCba$4a5SAF-NH2 |
| 1029 | 1743 | Ac-LTF34F2$4rn6AYWAQCba$4a5SAF-NH2 |
| 1030 | 1744 | Ac-LTF$4rn6AF4coohWAQCba$4a5SAF-NH2 |
| 1031 | 1745 | Ac-LTF$4rn6EY6clWAQCba$4a5SAF-NH2 |
| 1032 | 1746 | Ac-LTF$4rn6AYWSQCba$4a5SAF-NH2 |
| 1033 | 1747 | Ac-LTF$4rn6AYWWQCba$4a5SAF-NH2 |
| 1034 | 1748 | Ac-LTF$4rn6AYWAQCba$4a5AAIa-NH2 |
| 1035 | 1749 | Ac-LTF34F2$4rn6AYWAQCba$4a5AAIa-NH2 |
| 1036 | 1750 | Ac-LTF$4rn6AY6clWAQCba$4a5AAIa-NH2 |
| 1037 | 1751 | Ac-LTF$4rn6AF4coohWAQCba$4a5AAIa-NH2 |
| 1038 | 1752 | Ac-LTF$4rn6EYWAQCba$4a5AAFa-NH2 |
| 1039 | 1753 | Ac-LTF$4rn6EYWAQCba$4a5AAFa-NH2 |
| 1040 | 1754 | Ac-ETF$4rn6AYWAQCba$4a5AWNlea-NH2 |
| 1041 | 1755 | Ac-LTF$4rn6EYWAQCba$4a5AWNlea-NH2 |
| 1042 | 1756 | Ac-ETF$4rn6EYWAQCba$4a5AWNlea-NH2 |
| 1043 | 1757 | Ac-ETF$4rn6EYWAQCba$4a5AWNlea-NH2 |
| 1044 | 1758 | Ac-LTF$4rn6AYWAQCba$4a5SAFa-NH2 |
| 1045 | 1759 | Ac-LTF$4rn6AYWAQCba$4a5SAFa-NH2 |
| 1046 | 1760 | Ac-ETF$4rn6AYWAQL$4a5AWNlea-NH2 |
| 1047 | 1761 | Ac-LTF$4rn6EYWAQL$4a5AWNlea-NH2 |
| 1048 | 1762 | Ac-ETF$4rn6EYWAQL$4a5AWNlea-NH2 |
| 1049 | 1763 | Dmaac-LTF$4rn6EYWAQhL$4a5SAA-NH2 |
| 1050 | 1764 | Hexac-LTF$4rn6EYWAQhL$4a5SAA-NH2 |
| 1051 | 1765 | Napac-LTF$4rn6EYWAQhL$4a5SAA-NH2 |
| 1052 | 1766 | Decac-LTF$4rn6EYWAQhL$4a5SAA-NH2 |
| 1053 | 1767 | Admac-LTF$4rn6EYWAQhL$4a5SAA-NH2 |
| 1054 | 1768 | Tmac-LTF$4rn6EYWAQhL$4a5SAA-NH2 |
| 1055 | 1769 | Pam-LTF$4rn6EYW AQhL$4a5SAA-NH2 |
| 1056 | 1770 | Ac-LTF$4rn6AYWAQCba$4a5AANleA-NH2 |
| 1057 | 1771 | Ac-LTF34F2$4rn6EYWAQCba$4a5AAIa-NH2 |
| 1058 | 1772 | Ac-LTF34F2$4rn6EYWAQCba$4a5SAA-NH2 |
| 1059 | 1773 | Ac-LTF34F2$4rn6EYWAQCba$4a5SAA-NH2 |
| 1060 | 1774 | Ac-LTF$4rn6EF4coohWAQCba$4a5SAA-NH2 |
| 1061 | 1775 | Ac-LTF$4rn6EF4coohWAQCba$4a5SAA-NH2 |
| 1062 | 1776 | Ac-LTF$4rn6EYWSQCba$4a5SAA-NH2 |
| 1063 | 1777 | Ac-LTF$4rn6EYWSQCba$4a5SAA-NH2 |
| 1064 | 1778 | Ac-LTF$4rn6EYWAQhL$4a5SAA-NH2 |
| 1065 | 1779 | Ac-LTF$4rn6AYWAQhL$4a5SAF-NH2 |
| 1066 | 1780 | Ac-LTF$4rn6AYWAQhL$4a5SAF-NH2 |
| 1067 | 1781 | Ac-LTF34F2$4rn6AYWAQhL$4a5SAA-NH2 |
| 1068 | 1782 | Ac-LTF34F2$4rn6AYWAQhL$4a5SAA-NH2 |
| 1069 | 1783 | Ac-LTF$4rn6AF4coohWAQhL$4a5SAA-NH2 |
| 1070 | 1784 | Ac-LTF$4rn6AF4coohWAQhL$4a5SAA-NH2 |
| 1071 | 1785 | Ac-LTF$4rn6AYWSQhL$4a5SAA-NH2 |
| 1072 | 1786 | Ac-LTF$4rn6AYWSQhL$4a5SAA-NH2 |
| 1073 | 1787 | Ac-LTF$4rn6EYWAQL$4a5AANleA-NH2 |
| 1074 | 1788 | Ac-LTF34F2$4rn6AYWAQL$4a5AANleA-NH2 |
| 1075 | 1789 | Ac-LTF$4rn6AF4coohWAQL$4a5AANleA-NH2 |
| 1076 | 1790 | Ac-LTF$4rn6AYWSQL$4a5AANleA-NH2 |
| 1077 | 1791 | Ac-LTF34F2$4rn6AYWAQhL$4a5AANleA-NH2 |
| 1078 | 1792 | Ac-LTF34F2$4rn6AYWAQhL$4a5AANleA-NH2 |
| 1079 | 1793 | Ac-LTF$4rn6AF4coohWAQhL$4a5AANleA-NH2 |
| 1080 | 1794 | Ac-LTF$4rn6AF4coohWAQhL$4a5AANleA-NH2 |
| 1081 | 1795 | Ac-LTF$4rn6AYWSQhL$4a5AANleA-NH2 |
| 1082 | 1796 | Ac-LTF$4rn6AYWSQhL$4a5AANleA-NH2 |
| 1083 | 1797 | Ac-LTF$4rn6AYWAQhL$4a5AAAAa-NH2 |
| 1084 | 1798 | Ac-LTF$4rn6AYWAQhL$4a5AAAAa-NH2 |
| 1085 | 1799 | Ac-LTF$4rn6AYWAQL$4a5AAAAAAa-NH2 |
| 1086 | 1800 | Ac-LTF$4rn6AYWAQL$4a5AAAAAAa-NH2 |
| 1087 | 1801 | Ac-LTF$4rn6EYWAQhL$4a5AANleA-NH2 |
| 1088 | 1802 | Ac-AATF$4rn6AYWAQL$4a5AANleA-NH2 |
| 1089 | 1803 | Ac-LTF$4rn6AYWAQL$4a5AANleAA-NH2 |
| 1090 | 1804 | Ac-ALTF$4rn6AYWAQL$4a5AANleAA-NH2 |
| 1091 | 1805 | Ac-LTF$4rn6AYWAQCba$4a5AANleAA-NH2 |
| 1092 | 1806 | Ac-LTF$4rn6AYWAQhL$4a5AANleAA-NH2 |
| 1093 | 1807 | Ac-LTF$4rn6EYWAQCba$4a5SAAA-NH2 |
| 1094 | 1808 | Ac-LTF$4rn6EYWAQCba$4a5SAAA-NH2 |
| 1095 | 1809 | Ac-LTF$4rn6EYWAQCba$4a5SAAAA-NH2 |
| 1096 | 1810 | Ac-LTF$4rn6EYWAQCba$4a5SAAAA-NH2 |
| 1097 | 1811 | Ac-ALTF$4rn6EYWAQCba$4a5SAA-NH2 |
| 1098 | 1812 | Ac-ALTF$4rn6EYWAQCba$4a5SAAA-NH2 |
| 1099 | 1813 | Ac-ALTF$4rn6EYWAQCba$4a5SAA-NH2 |
| 1100 | 1814 | Ac-LTF$4rn6EY6clWAQCba$4a5SAA-NH2 |
| 1101 | 1815 | Ac-LTF$4rn6EF4cooh6clWAQCba$4a5SANleA-NH2 |
| 1102 | 1816 | Ac-LTF$4rn6EF4cooh6clWAQCba$4a5SANleA-NH2 |
| 1103 | 1817 | Ac-LTF$4rn6EF4cooh6clWAQCba$4a5AAIa-NH2 |
| 1104 | 1818 | Ac-LTF$4rn6EF4cooh6clWAQCba$4a5AAIa-NH2 |
| 1105 | 1819 | Ac-LTF$4rn6AY6clWAQL$4a5AAAAAa-NH2 |
| 1106 | 1820 | Ac-LTF$4rn6AY6clWAQL$4a5AAAAAa-NH2 |
| 1107 | 1821 | Ac-F$4rn6AY6clWEAL$4a5AAAAAAa-NH2 |
| 1108 | 1822 | Ac-ETF$4rn6EYWAQL$4a5AAAAAa-NH2 |
| 1109 | 1823 | Ac-ETF$4rn6EYWAQL$4a5AAAAAa-NH2 |
| 1110 | 1824 | Ac-LTF$4rn6EYWAQL$4a5AAAAAAa-NH2 |
| 1111 | 1825 | Ac-LTF$4rn6EYWAQL$4a5AAAAAAa-NH2 |
| 1112 | 1826 | Ac-LTF$4rn6AYWAQL$4a5AANleAAa-NH2 |
| 1113 | 1827 | Ac-LTF$4rn6AYWAQL$4a5AANleAAa-NH2 |
| 1114 | 1828 | Ac-LTF$4rn6EYWAQCba$4a5AAAAAa-NH2 |
| 1115 | 1829 | Ac-LTF$4rn6EYWAQCba$4a5AAAAAa-NH2 |
| 1116 | 1830 | Ac-LTF$4rn6EF4coohWAQCba$4a5AAAAAa-NH2 |
| 1117 | 1831 | Ac-LTF$4rn6EF4coohWAQCba$4a5AAAAAa-NH2 |
| 1118 | 1832 | Ac-LTF$4rn6EYWSQCba$4a5AAAAAa-NH2 |
| 1119 | 1833 | Ac-LTF$4rn6EYWSQCba$4a5AAAAAa-NH2 |
| 1120 | 1834 | Ac-LTF$4rn6EYWAQCba$4a5SAAa-NH2 |
| 1121 | 1835 | Ac-LTF$4rn6EYWAQCba$4a5SAAa-NH2 |
| 1122 | 1836 | Ac-ALTF$4rn6EYWAQCba$4a5SAAa-NH2 |
| 1123 | 1837 | Ac-ALTF$4rn6EYWAQCba$4a5SAAa-NH2 |
| 1124 | 1838 | Ac-ALTF$4rn6EYWAQCba$4a5SAAAa-NH2 |
| 1125 | 1839 | Ac-ALTF$4rn6EYWAQCba$4a5SAAAa-NH2 |
| 1126 | 1840 | Ac-AALTF$4rn6EYWAQCba$4a5SAAAa-NH2 |
| 1127 | 1841 | Ac-AALTF$4rn6EYWAQCba$4a5SAAAa-NH2 |
| 1128 | 1842 | Ac-RTF$4rn6EYWAQCba$4a5SAA-NH2 |
| 1129 | 1843 | Ac-LRF$4rn6EYWAQCba$4a5SAA-NH2 |
| 1130 | 1844 | Ac-LTF$4rn6EYWRQCba$4a5SAA-NH2 |
| 1131 | 1845 | Ac-LTF$4rn6EYWARCba$4a5SAA-NH2 |
| 1132 | 1846 | Ac-LTF$4rn6EYWAQCba$4a5RAA-NH2 |
| 1133 | 1847 | Ac-LTF$4rn6EYWAQCba$4a5SRA-NH2 |
| 1134 | 1848 | Ac-LTF$4rn6EYWAQCba$4a5SAR-NH2 |
| 1135 | 1849 | 5-FAM-BaLTF$4rn6AYWAQL$4a5AANleA-NH2 |
| 1136 | 1850 | Ac-LAF$4rn6EYWAQL$4a5AANleA-NH2 |
| 1137 | 1851 | Ac-ATF$4rn6EYWAQL$4a5AANleA-NH2 |
| 1138 | 1852 | Ac-AAF$4rn6EYWAQL$4a5AANleA-NH2 |
| 1139 | 1853 | Ac-AAAF$4rn6EYWAQL$4a5AANleA-NH2 |
| 1140 | 1854 | Ac-AAAAF$4rn6EYWAQL$4a5AANleA-NH2 |
| 1141 | 1855 | Ac-AATF$4rn6EYWAQL$4a5AANleA-NH2 |
| 1142 | 1856 | Ac-AALTF$4rn6EYWAQL$4a5AANleA-NH2 |
| 1143 | 1857 | Ac-AAALTF$4rn6EYWAQL$4a5AANleA-NH2 |
| 1144 | 1858 | Ac-LTF$4rn6EYWAQL$4a5AANleAA-NH2 |
| 1145 | 1859 | Ac-ALTF$4rn6EYWAQL$4a5AANleAA-NH2 |
| 1146 | 1860 | Ac-AALTF$4rn6EYWAQL$4a5AANleAA-NH2 |
| 1147 | 1861 | Ac-LTF$4rn6EYWAQCba$4a5AANleAA-NH2 |
| 1148 | 1862 | Ac-LTF$4rn6EYWAQhL$4a5AANleAA-NH2 |
| 1149 | 1863 | Ac-ALTF$4rn6EYWAQhL$4a5AANleAA-NH2 |
| 1150 | 1864 | Ac-LTF$4rn6ANmYWAQL$4a5AANleA-NH2 |
| 1151 | 1865 | Ac-LTF$4rn6ANmYWAQL$4a5AANleA-NH2 |
| 1152 | 1866 | Ac-LTF$4rn6AYNmWAQL$4a5AANleA-NH2 |
| 1153 | 1867 | Ac-LTF$4rn6AYNmWAQL$4a5AANleA-NH2 |
| 1154 | 1868 | Ac-LTF$4rn6AYAmwAQL$4a5AANleA-NH2 |
| 1155 | 1869 | Ac-LTF$4rn6AYAmwAQL$4a5AANleA-NH2 |
| 1156 | 1870 | Ac-LTF$4rn6AYWAibQL$4a5AANleA-NH2 |
| 1157 | 1871 | Ac-LTF$4rn6AYWAibQL$4a5AANleA-NH2 |
| 1158 | 1872 | Ac-LTF$4rn6AYWAQL$4a5AAibNleA-NH2 |
| 1159 | 1873 | Ac-LTF$4rn6AYWAQL$4a5AAibNleA-NH2 |
| 1160 | 1874 | Ac-LTF$4rn6AYWAQL$4a5ASarNleA-NH2 |
| 1161 | 1875 | Ac-LTF$4rn6AYWAQL$4a5ASarNleA-NH2 |
| 1162 | 1876 | Ac-LTF$4rn6AYWAQL$4a5AANleAib-NH2 |
| 1163 | 1877 | Ac-LTF$4rn6AYWAQL$4a5AANleAib-NH2 |
| 1164 | 1878 | Ac-LTF$4rn6AYWAQL$4a5AANleNmA-NH2 |
| 1165 | 1879 | Ac-LTF$4rn6AYWAQL$4a5AANleNmA-NH2 |
| 1166 | 1880 | Ac-LTF$4rn6AYWAQL$4a5AANleSar-NH2 |
| 1167 | 1881 | Ac-LTF$4rn6AYWAQL$4a5AANleSar-NH2 |
| 1168 | 1882 | Ac-LTF$4rn6AYWAQL$4a5AANleAAib-NH2 |
| 1169 | 1883 | Ac-LTF$4rn6AYWAQL$4a5AANleAAib-NH2 |
| 1170 | 1884 | Ac-LTF$4rn6AYWAQL$4a5AANleANmA-NH2 |
| 1171 | 1885 | Ac-LTF$4rn6AYWAQL$4a5AANleANmA-NH2 |
| 1172 | 1886 | Ac-LTF$4rn6AYWAQL$4a5AANleAa-NH2 |
| 1173 | 1887 | Ac-LTF$4rn6AYWAQL$4a5AANleAa-NH2 |
| 1174 | 1888 | Ac-LTF$4rn6AYWAQL$4a5AANleASar-NH2 |
| 1175 | 1889 | Ac-LTF$4rn6AYWAQL$4a5AANleASar-NH2 |
| 1176 | 1890 | Ac-LTF$4rn6Cou4YWAQL$4a5AANleA-NH2 |
| 1177 | 1891 | Ac-LTF$4rn6Cou4YWAQL$4a5AANleA-NH2 |
| 1178 | 1892 | Ac-LTF$4rn6AYWCou4QL$4a5AANleA-NH2 |
| 1179 | 1893 | Ac-LTF$4rn6AYWAQL$4a5Cou4ANleA-NH2 |
| 1180 | 1894 | Ac-LTF$4rn6AYWAQL$4a5Cou4ANleA-NH2 |
| 1181 | 1895 | Ac-LTF$4rn6AYWAQL$4a5ACou4NleA-NH2 |
| 1182 | 1896 | Ac-LTF$4rn6AYWAQL$4a5ACou4NleA-NH2 |
| 1183 | 1897 | Ac-LTF$4rn6AYWAQL$4a5AANleA-OH |
| 1184 | 1898 | Ac-LTF$4rn6AYWAQL$4a5AANleA-OH |
| 1185 | 1899 | Ac-LTF$4rn6AYWAQL$4a5AANleA-NHnPr |
| 1186 | 1900 | Ac-LTF$4rn6AYWAQL$4a5AANleA-NHnPr |
| 1187 | 1901 | Ac-LTF$4rn6AYWAQL$4a5AANleA-NHnBu33Me |
| 1188 | 1902 | Ac-LTF$4rn6AYWAQL$4a5AANleA-NHnBu33Me |
| 1189 | 1903 | Ac-LTF$4rn6AYWAQL$4a5AANleA-NHHex |
| 1190 | 1904 | Ac-LTF$4rn6AYWAQL$4a5AANleA-NHHex |
| 1191 | 1905 | Ac-LTA$4rn6AYWAQL$4a5AANleA-NH2 |
| 1192 | 1906 | Ac-LThL$4rn6AYWAQL$4a5AANleA-NH2 |
| 1193 | 1907 | Ac-LTF$4rn6AYAAQL$4a5AANleA-NH2 |
| 1194 | 1908 | Ac-LTF$4rn6AY2NalAQL$4a5AANleA-NH2 |
| 1195 | 1909 | Ac-LTF$4rn6EYWCou4QCba$4a5SAA-NH2 |
| 1196 | 1910 | Ac-LTF$4rn6EYWCou7QCba$4a5SAA-NH2 |
| 1197 | 1911 | Dmaac-LTF$4rn6EYWAQCba$4a5SAA-NH2 |
| 1198 | 1912 | Dmaac-LTF$4rn6AYWAQL$4a5AAAAAa-NH2 |
| 1199 | 1913 | Dmaac-LTF$4rn6EYWAQL$4a5AAAAAa-NH2 |
| 1200 | 1914 | Dmaac-LTF$4rn6EF4coohWAQCba$4a5AAIa-NH2 |
| 1201 | 1915 | Dmaac-LTF$4rn6EF4coohWAQCba$4a5AAIa-NH2 |
| 1202 | 1916 | Dmaac-LTF$4rn6AYWAQL$4a5AANleA-NH2 |
| 1203 | 1917 | Cou6BaLTF$4rn6EYWAQhL$4a5SAA-NH2 |
| 1204 | 1918 | Cou8BaLTF$4rn6EYWAQhL$4a5SAA-NH2 |
| 1205 | 1919 | Ac-LTF4I$4rn6EYWAQL$4a5AAAAAa-NH2 |

TABLE 3A

| | SEQ | | Exact | Found | Calc | Calc | Calc |
|---|---|---|---|---|---|---|---|
| SP | ID NO: | Sequence | Mass | Mass | (M + 1)/1 | (M + 2)/2 | (M + 3)/3 |
| 1206 | 1920 | Ac-LTF$4rn6AYWAQL$4a5AANleA-NH2 | 1812.01 | 907.89 | 1813.02 | 907.01 | 605.01 |
| 1207 | 1921 | Ac-LTF$4rn6AYWAQL$4a5AAAAAa-NH2 | 1912.04 | 957.75 | 1913.05 | 957.03 | 638.35 |
| 1208 | 1922 | Ac-LTF$4rn6EYWAQL$4a5AAAAAa-NH2 | 1970.04 | 986.43 | 1971.05 | 986.03 | 657.69 |
| 1209 | 1923 | Ac-LTF$5rn6AYWAQL$5a5AAAAAa-NH2 | 1912.04 | 957.38 | 1913.05 | 957.03 | 638.35 |
| 1210 | 1924 | Ac-LTF$4rn6EYWAQCba$4a5SAA-NH2 | 1784.93 | 894.38 | 1785.94 | 893.47 | 595.98 |
| 1211 | 1925 | Ac-LTF$4rn4EYWAQCba$4a5SAA-NH2 | 1756.89 | 880.05 | 1757.9 | 879.45 | 586.64 |
| 1212 | 1926 | Ac-LTF$4rn5EYWAQCba$4a5SAA-NH2 | 1770.91 | 887.08 | 1771.92 | 886.46 | 591.31 |
| 1213 | 1927 | Ac-LTF$5rn6EYWAQCba$5a5SAA-NH2 | 1784.92 | 894.11 | 1785.93 | 893.47 | 595.98 |
| 1214 | 1928 | Ac-LTF$4rn6EYWAQCba5I-$4a5SAA-NH2 | 1910.82 | 957.01 | 1911.83 | 956.42 | 637.95 |
| 1215 | 1929 | Ac-LTA$5rn6EYWAQCba$5a5SAA-NH2 | 1708.89 | 856 | 1709.9 | 855.45 | 570.64 |
| 1216 | 1930 | Ac-LTA$4rn6EYWAQCba$4a5SAA-NH2 | 1708.89 | 856 | 1709.9 | 855.45 | 570.64 |
| 1217 | 1931 | 5-FAM-BaLTF$4rn6EYWAQCba$4a5SAA-NH2 | 2172 | 1087.81 | 2173.01 | 1087.01 | 725.01 |
| 1218 | 1932 | 5-FAM-BaLTA$4rn6EYWAQCba$4a5SAA-NH2 | 2095.97 | 1049.79 | 2096.98 | 1048.99 | 699.66 |
| 1219 | 1933 | 5-FAM-BaLTF$5rn6EYWAQCba$5a5SAA-NH2 | 2172 | 1087.53 | 2173.01 | 1087.01 | 725.01 |
| 1220 | 1934 | 5-FAM-BaLTA$5rn6EYWAQCba$5a5SAA-NH2 | 2095.97 | 1049.98 | 2096.98 | 1048.99 | 699.66 |
| 1221 | 1935 | Ac-LTF$4rn6EYWAQCba5Ph-$4a5SAA-NH2 | 1675.87 | 932.31 | 1676.88 | 931.48 | 559.63 |
| 1222 | 1936 | Ac-LTF$4rn6EYWAQCba5Prp-$4a5SAA-NH2 | 1675.87 | 914.46 | 1676.88 | 913.48 | 559.63 |
| 1223 | 1937 | Ac-LTF$4rn6AYWAAL$4a5AAAAAa-NH2 | 1855.01 | | 1856.02 | 928.51 | 619.34 |
| 1224 | 1938 | Ac-LTF$4rn6EYWAQCba5penNH2-$4a5SAA-NH2 | 1675.87 | | 1676.88 | 838.94 | 559.63 |
| 1225 | 1939 | Ac-LTF$4rn6EYWAQCba5BnzNH2-$4a5SAA-NH2 | 1675.87 | | 1676.88 | 838.94 | 559.63 |
| 1226 | 1940 | Ac-LTF$4rn6EYWAQCba5prpOMe-$4a5SAA-NH2 | | 929.17 | | 928.48 | |
| 1227 | 1941 | Ac-LTF$5rn6EYWAQL4Me$5a5AAAAAa-NH2 | 1926.05 | | 1927.06 | 964.03 | 643.02 |
| 1228 | 1942 | Ac-LTF$5rn6EYWAQL4Ph$5a5AAAAAa-NH2 | 1988.07 | | 1989.07 | 995.04 | 663.70 |
| 1229 | 1943 | Ac-LTF$5rn6EYWAQCba4Me$5a5SAANH2 | 1740.93 | | 1741.94 | 871.48 | 581.32 |
| 1230 | 1944 | Ac-LTF$5rn6EYWAQCba4Ph$5a5SAANH2 | 1802.95 | | 1803.96 | 902.48 | 601.99 |

### Example 4: Preparation of Peptidomimetic Macrocycles Using a Boc-Protected Amino Acid

[0559] Peptidomimetic macrocycle precursors comprising an R8 amino acid at position “i” and an S5 amino acid at position “i+7” were prepared. The amino acid at position “i+3” was a Boc-protected tryptophan, which was incorporated during solid-phase synthesis. Specifically, the Boc-protected tryptophan amino acid shown below was used during solid phase synthesis:

[chemical structure]

[0560] Metathesis was performed using a ruthenium catalyst prior to the cleavage and deprotection steps. The composition obtained following cyclization was determined by HPLC analysis and was found to contain primarily peptidomimetic macrocycles having a crosslinker comprising a trans olefin (“iso2”, comprising the double bond in an E configuration). Unexpectedly, a ratio of 90:10 was observed for the trans and cis products, respectively.

### Example 5: Peptidomimetic Macrocycle Solubility

[0561] Peptidomimetic macrocycles were first dissolved in neat N, N-dimethylacetamide (DMA) to make 20× stock solutions over a concentration range of 20-140 mg/mL. The DMA stock solutions were diluted 20-fold in an aqueous vehicle containing 2% Solutol-HS-15, 25 mM histidine, and 45 mg/mL mannitol to obtain final concentrations of 1-7 mg/ml of the peptidomimetic macrocycles in 5% DMA, 2% Solutol-HS-15, 25 mM histidine, and 45 mg/mL mannitol. The final solutions were mixed gently by repeat pipetting or light vortexing. The final solutions were sonicated for 10 min at room temperature in an ultrasonic water bath. Careful visual observations were performed under a hood light using a 7× visual amplifier to determine if precipitates existed on the bottom of the flasks or as a suspension. Additional concentration ranges were tested as needed to determine the maximum solubility limit for each peptidomimetic macrocycle.

### Example 6: X-Ray Co-Crystallography of Peptidomimetic Macrocycles in Complex with MDMX

[0562] For co-crystallization with peptide 46 (TABLE 2b), a stoichiometric amount of compound from a 100 mM stock solution in DMSO was added to a zebrafish MDMX protein solution. The solution was allowed to sit overnight at 4° C. before setting up crystallization experiments. Protein (residues 15-129, L46V/V95L) was obtained from an E. coli BL21 (DE3) expression system using the pET15b vector. Cells were grown at 37° C. and induced with 1 mM IPTG at an OD₆₀₀ of 0.7. Cells were allowed to grow an additional 18 hrs at 23° C. The protein was purified using Ni-NT Agarose followed by Superdex 75 buffered with 50 mM NaPO₄, pH 8.0, 150 mM NaCl, and 2 mM TCEP, and concentrating to 24 mg/ml. The buffer was exchanged to 20 mM Tris, pH 8.0, 50 mM NaCl, and 2 mM DTT for crystallization experiments. Initial crystals were obtained with the Nextal AMS screen #94, and the final optimized reservoir was 2.6 M AMS, 75 mM Hepes, pH 7.5. Crystals grew routinely as thin plates at 4° C. and were cryo-protected by pulling the crystals through a solution containing concentrated (3.4 M) malonate followed by flash cooling, storage, and shipment in liquid nitrogen.

[0563] Data collection was performed at the APS at beamline 31-ID (SGX-CAT) at 100° K and wavelength 0.97929 Å. The beamline was equipped with a Rayonix 225-HE detector. For data collection, crystals were rotated through 180° in 1° increments using 0.8 second exposure times. Data were processed and reduced using Mosflm/scala (CCP4) in space group C2 (unit cell: a=109.2786, b=81.0836, c=30.9058 Å, α=90, β=89.8577, γ=90°). Molecular replacement with program Molrep (CCP4) was performed with the MDMX component of the structure, and two molecules were identified in the asymmetric unit. Initial refinement of just the two molecules of the zebrafish MDMX with program Refmac (CCP4) resulted in an R-factor of 0.3424 (R_{free}=0.3712) and rmsd values for bonds (0.018 Å) and angles (1.698°). The electron densities of the stapled peptide components, starting with Gln¹⁹ and including the entire aliphatic staple, were very clear. Further refinement with CNX using data to 2.3 Å resolution resulted in a model (comprised of 1448 atoms from MDMX, 272 atoms from the stapled peptides and 46 water molecules) that was well refined (Rf=0.2601, R_{free}=0.3162, rmsd bonds=0.007 Å and rmsd angles=0.916°).

### Example 7: Circular Dichroism (CD) Analysis of Alpha-Helicity

[0564] Peptide solutions were analyzed by CD spectroscopy using a spectropolarimeter. A temperature controller was used to maintain temperature control of the optical cell. Results are expressed as mean molar ellipticity [θ] (deg cm² dmol⁻¹) as calculated from the equation [θ]=θobs·MRW/10*1*c where θobs is the observed ellipticity in millidegrees, MRW is the mean residue weight of the peptide (peptide molecular weight/number of residues), 1 is the optical path length of the cell in centimeters, and c is the peptide concentration in mg/ml. Peptide concentrations were determined by amino acid analysis. Stock solutions of peptides were prepared in benign CD buffer (20 mM phosphoric acid, pH 2). The stock solutions were used to prepare peptide solutions of 0.05 mg/ml in either benign CD buffer or CD buffer with 50% trifluoroethanol (TFE) for analyses in a 10 mm path length cell. Variable wavelength measurements of peptide solutions were scanned at 4° C. from 195 to 250 nm, in 0.2 nm increments, and a scan rate 50 nm per minute. The average of six scans is reported.

[0565] TABLE 4 shows CD data for selected peptidomimetic macrocycles:

TABLE 4

| | | | Molar | % Helix | % Helix |
|---|---|---|---|---|---|
| | Molar | Molar | Ellipticity | 50% TFE | benign |
| | Ellipticity | Ellipticity | TFE − Molar | compared | compared |
| | Benign (222 | 50% TFE (222 | Ellipticity | to 50% TFE | to 50% TFE |
| SP# | in 0% TFE) | in 50% TFE) | Benign | parent (CD) | parent (CD) |
| 7 | 124 | −19921.4 | −20045.4 | 137.3 | −0.9 |
| 11 | −398.2 | −16623.4 | 16225.2 | 106.1 | 2.5 |
| 41 | −909 | −21319.4 | 20410.4 | 136 | 5.8 |
| 43 | −15334.5 | −18247.4 | 2912.9 | 116.4 | 97.8 |
| 69 | −102.6 | −21509.7 | −21407.1 | 148.2 | 0.7 |
| 71 | −121.2 | −17957 | −17835.9 | 123.7 | 0.8 |
| 154 | −916.2 | −30965.1 | −30048.9 | 213.4 | 6.3 |
| 230 | −213.2 | −17974 | −17760.8 | 123.9 | 1.5 |
| 233 | −477.9 | −19032.6 | −18554.7 | 131.2 | 3.3 |

### Example 8: Direct Binding Assay MDM2 with Fluorescence Polarization (FP)

[0566] The assay was performed according to the following general protocol:

1. Dilute MDM2 (In-house, 41 kD) into FP buffer (High salt buffer-200 mM NaCl, 5 mM CHAPS, pH 7.5) to make 10 μM working stock solution.
2. Add 30 μl of 10 μM of protein stock solution into A1 and B1 well of 96-well black HE microplate (Molecular Devices).
3. Fill in 30 μl of FP buffer into column A2 to A12, B2 to B12, C1 to C12, and D1 to D12.
4. 2- or 3-fold series dilution of protein stock from A1, B1 into A2, B2; A2, B2 to A3, B3; . . . to reach the single digit nM concentration at the last dilution point.
5. Dilute 1 mM (in 100% DMSO) of FAM labeled linear peptide with DMSO to 100 μM (dilution 1:10). Then, dilute from 100 μM to 10 μM with water (dilution 1:10) and then dilute with FP buffer from 10 μM to 40 nM (dilution 1:250). This is the working solution which is a 10 nM concentration in well (dilution 1:4). Keep the diluted FAM labeled peptide in the dark until use.
6. Add 10 μl of 10 nM of FAM labeled peptide into each well and incubate and read at different time points. K_{D} with 5-FAM-BaLTFEHYWAQLTS-NH₂ (SEQ ID NO: 1947) is ˜13.38 nM.

### Example 9: Competitive Fluorescence Polarization Assay for MDM2

[0567] MDM2 (41 kD) was diluted into FP buffer (high-salt buffer-200 mM NaCl, 5 mM CHAPS, pH 7.5) to make a 84 nM (2×) working stock solution. 20p1 of the 84 nM (2×) protein stock solution was added into each well of a 96-well black microplate. 1 mM of FAM-labeled linear peptide (in 100% DMSO) was diluted to 100 μM with DMSO (dilution 1:10). Then, diluted solution was further diluted from 100 μM to 10 μM with water (dilution 1:10), and diluted again with FP buffer from 10 μM to 40 nM (dilution 1:250). The resulting working solution resulted in a 10 nM concentration in each well (dilution 1:4). The diluted FAM-labeled peptides were kept in the dark until use.

[0568] Unlabeled peptide dose plates were prepared with FP buffer starting with 1 μM (final) of the peptide. 5-fold serial dilutions were made for 6 points using the following dilution scheme. 10 mM of the solution (in 100% DMSO) with DMSO to 5 mM (dilution 1:2); dilution from 5 mM to 500 μM with H₂O (dilution 1:10); and dilution with FP buffer from 500 μM to 20 μM (dilution 1:25). 5-fold serial dilutions from 4 μM (4×) were made for 6 points. 10 μl of the serial diluted unlabeled peptides were transferred to each well, which was filled with 20 μl of 84 nM of protein. 10 μl of 10 nM (4×) of FAM-labeled peptide was added into each well, and the wells were incubated for 3 h before being read.

### Example 10: Direct Binding Assay MDMX with Fluorescence Polarization (FP)

[0569] MDMX (40 kD) was diluted into FP buffer (high-salt buffer-200 mM NaCl, 5 mM CHAPS, pH 7.5) to make a 10 μM working stock solution. 30 μl of the 10 μM of protein stock solution was added into the A1 and B1 wells of a 96-well black microplate. 30 μl of FP buffer was added to columns A2 to A12, B2 to B12, C1 to C12, and D1 to D12. 2-fold or 3-fold series dilutions of protein stocks were created from A1, B1 into A2, B2; A2, B2 to A3, B3; . . . to reach the single digit nM concentration at the last dilution point. 1 mM (in 100% DMSO) of a FAM-labeled linear peptide was diluted with DMSO to 100 μM (dilution 1:10). The resulting solution was diluted from 100 μM to 10 μM with water (dilution 1:10), and diluted again with FP buffer from 10 μM to 40 nM (dilution 1:250). The working solution resulted in 10 nM concentration in each well (dilution 1:4). The FAM-labeled peptides were kept in the dark until use. 10 μl of the 10 nM FAM-labeled peptide was added into each well, and the plate was incubated and read at different time points. The K_{D} with 5-FAM-BaLTFEHYWAQLTS-NH₂ (SEQ ID NO: 1947) was ˜51 nM.

### Example 11: Competitive Fluorescence Polarization Assay for MDMX

[0570] MDMX (40 kD) was diluted into FP buffer (high-salt buffer 200 mM NaCl, 5 mM CHAPS, pH 7.5) to make a 300 nM (2×) working stock solution. 20 μl of the 300 nM (2×) of protein stock solution was added into each well of 96-well black microplate. 1 mM (in 100% DMSO) of a FAM-labeled linear peptide was diluted with DMSO to a concentration of 100 μM (dilution 1:10). The solution was diluted from 100 μM to 10 μM with water (dilution 1:10), and diluted further with FP buffer from 10 μM to 40 nM (dilution 1:250). The final working solution resulted in a concentration of 10 nM per well (dilution 1:4). The diluted FAM-labeled peptide was kept in the dark until use. An unlabeled peptide dose plate was prepared with FP buffer starting with a concentration of 5 μM (final) of a peptide. 5-fold serial dilutions were prepared for 6 points using the following dilution scheme. 10 mM (in 100% DMSO) of the solution was diluted with DMSO to prepare a 5 mM (dilution 1:2) solution. The solution was diluted from 5 mM to 500 μM with H₂O (dilution 1:10), and diluted further with FP buffer from 500 μM to 20 μM (dilution 1:25). 5-fold serial dilutions from 20 μM (4×) were prepared for 6 points. 10 μl of the serially diluted unlabeled peptides were added to each well, which was filled with 20 μl of the 300 nM protein solution. 10 μl of the 10 nM (4×) FAM-labeled peptide solution was added into each well, and the wells were incubated for 3 h before reading.

[0571] Results from EXAMPLE 8-EXAMPLE 11 are shown in TABLE 5. The following scale is used: “+” represents a value greater than 1000 nM, “++” represents a value greater than 100 and less than or equal to 1000 nM, “+++” represents a value greater than 10 nM and less than or equal to 100 nM, and “++++” represents a value of less than or equal to 10 nM.

TABLE 5

| SP# | IC₅₀ (MDM2) | IC₅₀ (MDMX) | Ki (MDM2) | Ki (MDMX) |
|---|---|---|---|---|
| 3 | ++ | ++ | +++ | +++ |
| 4 | +++ | ++ | ++++ | +++ |
| 5 | +++ | ++ | ++++ | +++ |
| 6 | ++ | ++ | +++ | +++ |
| 7 | +++ | +++ | ++++ | +++ |
| 8 | ++ | ++ | +++ | +++ |
| 9 | ++ | ++ | +++ | +++ |
| 10 | ++ | ++ | +++ | +++ |
| 11 | +++ | ++ | ++++ | +++ |
| 12 | + | + | +++ | ++ |
| 13 | ++ | ++ | +++ | ++ |
| 14 | +++ | +++ | ++++ | ++++ |
| 15 | +++ | ++ | +++ | +++ |
| 16 | +++ | +++ | ++++ | +++ |
| 17 | +++ | +++ | ++++ | +++ |
| 18 | +++ | +++ | ++++ | ++++ |
| 19 | ++ | +++ | +++ | +++ |
| 20 | ++ | ++ | +++ | +++ |
| 21 | ++ | +++ | +++ | +++ |
| 22 | +++ | +++ | ++++ | +++ |
| 23 | ++ | ++ | +++ | +++ |
| 24 | +++ | ++ | ++++ | +++ |
| 26 | +++ | ++ | ++++ | +++ |
| 28 | +++ | +++ | ++++ | +++ |
| 30 | ++ | ++ | +++ | +++ |
| 32 | +++ | ++ | ++++ | +++ |
| 38 | + | ++ | ++ | +++ |
| 39 | + | ++ | ++ | ++ |
| 40 | ++ | ++ | ++ | +++ |
| 41 | ++ | +++ | +++ | +++ |
| 42 | ++ | ++ | +++ | ++ |
| 43 | +++ | +++ | ++++ | +++ |
| 45 | +++ | +++ | ++++ | ++++ |
| 46 | +++ | +++ | ++++ | +++ |
| 47 | ++ | ++ | +++ | +++ |
| 48 | ++ | ++ | +++ | +++ |
| 49 | ++ | ++ | +++ | +++ |
| 50 | +++ | ++ | ++++ | +++ |
| 52 | +++ | +++ | ++++ | ++++ |
| 54 | ++ | ++ | +++ | +++ |
| 55 | + | + | ++ | ++ |
| 65 | +++ | ++ | ++++ | +++ |
| 68 | ++ | ++ | +++ | +++ |
| 69 | +++ | ++ | ++++ | +++ |
| 70 | ++ | ++ | ++++ | +++ |
| 71 | +++ | ++ | ++++ | +++ |
| 75 | +++ | ++ | ++++ | +++ |
| 77 | +++ | ++ | ++++ | +++ |
| 80 | +++ | ++ | ++++ | +++ |
| 81 | ++ | ++ | +++ | +++ |
| 82 | ++ | ++ | +++ | +++ |
| 85 | +++ | ++ | ++++ | +++ |
| 99 | ++++ | ++ | ++++ | +++ |
| 100 | ++ | ++ | ++++ | +++ |
| 101 | +++ | ++ | ++++ | +++ |
| 102 | ++ | ++ | ++++ | +++ |
| 103 | ++ | ++ | ++++ | +++ |
| 104 | +++ | ++ | ++++ | +++ |
| 105 | +++ | ++ | ++++ | +++ |
| 106 | ++ | ++ | +++ | +++ |
| 107 | ++ | ++ | +++ | +++ |
| 108 | +++ | ++ | ++++ | +++ |
| 109 | +++ | ++ | ++++ | +++ |
| 110 | ++ | ++ | ++++ | +++ |
| 111 | ++ | ++ | ++++ | +++ |
| 112 | ++ | ++ | +++ | +++ |
| 113 | ++ | ++ | +++ | +++ |
| 114 | +++ | ++ | ++++ | +++ |
| 115 | ++++ | ++ | ++++ | +++ |
| 116 | + | + | ++ | ++ |
| 118 | ++++ | ++ | ++++ | +++ |
| 120 | +++ | ++ | ++++ | +++ |
| 121 | ++++ | ++ | ++++ | +++ |
| 122 | ++++ | ++ | ++++ | +++ |
| 123 | ++++ | ++ | ++++ | +++ |
| 124 | ++++ | ++ | ++++ | +++ |
| 125 | ++++ | ++ | ++++ | +++ |
| 126 | ++++ | ++ | ++++ | +++ |
| 127 | ++++ | ++ | ++++ | +++ |
| 128 | ++++ | ++ | ++++ | +++ |
| 129 | ++++ | ++ | ++++ | +++ |
| 130 | ++++ | ++ | ++++ | +++ |
| 133 | ++++ | ++ | ++++ | +++ |
| 134 | ++++ | ++ | ++++ | +++ |
| 135 | ++++ | ++ | ++++ | +++ |
| 136 | ++++ | ++ | ++++ | +++ |
| 137 | ++++ | ++ | ++++ | +++ |
| 139 | ++++ | ++ | ++++ | +++ |
| 142 | ++++ | +++ | ++++ | +++ |
| 144 | ++++ | ++ | ++++ | +++ |
| 146 | ++++ | ++ | ++++ | +++ |
| 148 | ++++ | ++ | ++++ | +++ |
| 150 | ++++ | ++ | ++++ | +++ |
| 153 | ++++ | +++ | ++++ | +++ |
| 154 | ++++ | +++ | ++++ | ++++ |
| 156 | ++++ | ++ | ++++ | +++ |
| 158 | ++++ | ++ | ++++ | +++ |
| 160 | ++++ | ++ | ++++ | +++ |
| 161 | ++++ | ++ | ++++ | +++ |
| 166 | ++++ | ++ | ++++ | +++ |
| 167 | +++ | ++ | ++++ | ++ |
| 169 | ++++ | +++ | ++++ | +++ |
| 170 | ++++ | ++ | ++++ | +++ |
| 173 | ++++ | ++ | ++++ | +++ |
| 175 | ++++ | ++ | ++++ | +++ |
| 177 | +++ | ++ | ++++ | +++ |
| 180 | +++ | ++ | ++++ | +++ |
| 182 | ++++ | ++ | ++++ | +++ |
| 185 | +++ | + | ++++ | ++ |
| 186 | +++ | ++ | ++++ | +++ |
| 189 | +++ | ++ | ++++ | +++ |
| 192 | +++ | ++ | ++++ | +++ |
| 194 | +++ | ++ | ++++ | ++ |
| 196 | +++ | ++ | ++++ | +++ |
| 197 | ++++ | ++ | ++++ | +++ |
| 199 | +++ | ++ | ++++ | ++ |
| 201 | +++ | ++ | ++++ | ++ |
| 203 | +++ | ++ | ++++ | +++ |
| 204 | +++ | ++ | ++++ | +++ |
| 206 | +++ | ++ | ++++ | +++ |
| 207 | ++++ | ++ | ++++ | +++ |
| 210 | ++++ | ++ | ++++ | +++ |
| 211 | ++++ | ++ | ++++ | +++ |
| 213 | ++++ | ++ | ++++ | +++ |
| 215 | +++ | ++ | ++++ | +++ |
| 217 | ++++ | ++ | ++++ | +++ |
| 218 | ++++ | ++ | ++++ | +++ |
| 221 | ++++ | +++ | ++++ | +++ |
| 227 | ++++ | ++ | ++++ | +++ |
| 230 | ++++ | +++ | ++++ | ++++ |
| 232 | ++++ | ++ | ++++ | +++ |
| 233 | ++++ | +++ | ++++ | +++ |
| 236 | +++ | ++ | ++++ | +++ |
| 237 | +++ | ++ | ++++ | +++ |
| 238 | +++ | +++ | ++++ | +++ |
| 239 | +++ | ++ | +++ | +++ |
| 240 | +++ | ++ | ++++ | +++ |
| 241 | +++ | ++ | ++++ | +++ |
| 242 | +++ | ++ | ++++ | +++ |
| 243 | +++ | +++ | ++++ | +++ |
| 244 | +++ | +++ | ++++ | ++++ |
| 245 | +++ | +++ | ++++ | +++ |
| 246 | +++ | ++ | ++++ | +++ |
| 247 | +++ | +++ | ++++ | +++ |
| 248 | +++ | +++ | ++++ | +++ |
| 249 | +++ | +++ | ++++ | ++++ |
| 250 | ++ | + | ++ | + |
| 252 | ++ | + | ++ | + |
| 254 | +++ | ++ | ++++ | +++ |
| 255 | +++ | +++ | ++++ | +++ |
| 256 | +++ | +++ | ++++ | +++ |
| 257 | +++ | +++ | ++++ | +++ |
| 258 | +++ | ++ | ++++ | +++ |
| 259 | +++ | +++ | ++++ | +++ |
| 260 | +++ | +++ | ++++ | +++ |
| 261 | +++ | ++ | ++++ | +++ |
| 262 | +++ | ++ | ++++ | +++ |
| 263 | +++ | ++ | ++++ | +++ |
| 264 | +++ | +++ | ++++ | +++ |
| 266 | +++ | ++ | ++++ | +++ |
| 267 | +++ | +++ | ++++ | ++++ |
| 270 | ++++ | +++ | ++++ | +++ |
| 271 | ++++ | +++ | ++++ | ++++ |
| 272 | ++++ | +++ | ++++ | ++++ |
| 276 | +++ | +++ | ++++ | ++++ |
| 277 | +++ | +++ | ++++ | ++++ |
| 278 | +++ | +++ | ++++ | ++++ |
| 279 | ++++ | +++ | ++++ | +++ |
| 280 | +++ | ++ | ++++ | +++ |
| 281 | +++ | + | +++ | ++ |
| 282 | ++ | + | +++ | + |
| 283 | +++ | ++ | +++ | ++ |
| 284 | +++ | ++ | ++++ | +++ |
| 289 | +++ | +++ | ++++ | +++ |
| 291 | +++ | +++ | ++++ | ++++ |
| 293 | ++++ | +++ | ++++ | +++ |
| 306 | ++++ | ++ | ++++ | +++ |
| 308 | ++ | ++ | +++ | +++ |
| 310 | +++ | +++ | ++++ | +++ |
| 312 | +++ | ++ | +++ | +++ |
| 313 | ++++ | ++ | ++++ | +++ |
| 314 | ++++ | +++ | ++++ | ++++ |
| 315 | +++ | +++ | ++++ | +++ |
| 316 | ++++ | ++ | ++++ | +++ |
| 317 | +++ | ++ | +++ | +++ |
| 318 | +++ | ++ | +++ | +++ |
| 319 | +++ | ++ | +++ | ++ |
| 320 | +++ | ++ | +++ | ++ |
| 321 | +++ | ++ | ++++ | +++ |
| 322 | +++ | ++ | +++ | ++ |
| 323 | +++ | + | +++ | ++ |
| 328 | +++ | +++ | ++++ | +++ |
| 329 | +++ | +++ | ++++ | +++ |
| 331 | ++++ | +++ | ++++ | ++++ |
| 332 | ++++ | +++ | ++++ | ++++ |
| 334 | ++++ | +++ | ++++ | ++++ |
| 336 | ++++ | +++ | ++++ | ++++ |
| 339 | ++++ | ++ | ++++ | +++ |
| 341 | +++ | +++ | ++++ | ++++ |
| 343 | +++ | +++ | ++++ | ++++ |
| 347 | +++ | +++ | ++++ | +++ |
| 349 | ++++ | +++ | ++++ | ++++ |
| 351 | ++++ | +++ | ++++ | ++++ |
| 353 | ++++ | +++ | ++++ | ++++ |
| 355 | ++++ | +++ | ++++ | ++++ |
| 357 | ++++ | +++ | ++++ | ++++ |
| 359 | ++++ | +++ | ++++ | +++ |
| 360 | ++++ | ++++ | ++++ | ++++ |
| 363 | +++ | +++ | ++++ | ++++ |
| 364 | +++ | +++ | ++++ | ++++ |
| 365 | +++ | +++ | ++++ | ++++ |
| 366 | +++ | +++ | ++++ | +++ |
| 369 | ++ | ++ | +++ | +++ |
| 370 | +++ | +++ | ++++ | +++ |
| 371 | ++ | ++ | +++ | +++ |
| 372 | ++ | ++ | +++ | +++ |
| 373 | +++ | +++ | +++ | +++ |
| 374 | +++ | +++ | ++++ | ++++ |
| 375 | +++ | +++ | ++++ | ++++ |
| 376 | +++ | +++ | ++++ | ++++ |
| 377 | +++ | +++ | ++++ | +++ |
| 378 | +++ | +++ | ++++ | +++ |
| 379 | +++ | +++ | ++++ | +++ |
| 380 | +++ | +++ | ++++ | +++ |
| 381 | +++ | +++ | ++++ | +++ |
| 382 | +++ | +++ | ++++ | ++++ |
| 384 | ++ | + | ++ | + |
| 386 | ++ | + | ++ | + |
| 388 | ++ | +++ | +++ | ++++ |
| 390 | +++ | +++ | ++++ | +++ |
| 392 | +++ | +++ | ++++ | ++++ |
| 394 | ++++ | +++ | ++++ | ++++ |
| 396 | ++++ | ++++ | ++++ | ++++ |
| 398 | +++ | +++ | ++++ | +++ |
| 402 | ++++ | ++++ | ++++ | ++++ |
| 404 | +++ | +++ | ++++ | ++++ |
| 408 | +++ | +++ | ++++ | +++ |
| 410 | ++++ | ++++ | ++++ | ++++ |
| 411 | ++ | + | ++ | + |
| 412 | ++++ | +++ | ++++ | ++++ |
| 415 | ++++ | ++++ | ++++ | ++++ |
| 416 | +++ | +++ | ++++ | +++ |
| 417 | +++ | +++ | ++++ | +++ |
| 418 | ++++ | +++ | ++++ | ++++ |
| 419 | +++ | +++ | +++ | ++++ |
| 421 | ++++ | ++++ | ++++ | ++++ |
| 423 | +++ | +++ | ++++ | +++ |
| 425 | +++ | +++ | +++ | +++ |
| 427 | ++ | ++ | +++ | +++ |
| 432 | ++++ | +++ | ++++ | ++++ |
| 434 | +++ | +++ | ++++ | +++ |
| 435 | ++++ | +++ | ++++ | ++++ |
| 437 | +++ | +++ | ++++ | +++ |
| 439 | ++++ | +++ | ++++ | ++++ |
| 441 | ++++ | ++++ | ++++ | ++++ |
| 443 | +++ | +++ | ++++ | +++ |
| 445 | +++ | ++ | ++++ | +++ |
| 446 | +++ | + | ++++ | + |
| 447 | ++ | + | ++ | + |
| 551 | N/A | N/A | ++++ | +++ |
| 555 | N/A | N/A | ++++ | +++ |
| 556 | N/A | N/A | ++++ | +++ |
| 557 | N/A | N/A | +++ | +++ |
| 558 | N/A | N/A | +++ | +++ |
| 559 | N/A | N/A | +++ | +++ |
| 560 | N/A | N/A | + | + |
| 561 | N/A | N/A | ++++ | +++ |
| 562 | N/A | N/A | +++ | +++ |
| 563 | N/A | N/A | +++ | +++ |
| 564 | N/A | N/A | ++++ | +++ |
| 565 | N/A | N/A | +++ | +++ |
| 566 | N/A | N/A | ++++ | +++ |
| 567 | N/A | N/A | ++++ | +++ |
| 568 | N/A | N/A | ++++ | ++++ |
| 569 | N/A | N/A | ++++ | +++ |
| 570 | N/A | N/A | ++++ | +++ |
| 571 | N/A | N/A | ++++ | +++ |
| 572 | N/A | N/A | +++ | +++ |
| 573 | N/A | N/A | +++ | +++ |
| 574 | N/A | N/A | ++++ | +++ |
| 575 | N/A | N/A | ++++ | +++ |
| 576 | N/A | N/A | ++++ | +++ |
| 577 | N/A | N/A | ++++ | +++ |
| 578 | N/A | N/A | ++++ | +++ |
| 585 | N/A | N/A | +++ | +++ |
| 586 | N/A | N/A | ++++ | +++ |
| 587 | N/A | N/A | ++++ | ++++ |
| 589 | N/A | N/A | ++++ | |
| 594 | N/A | N/A | ++++ | ++++ |
| 596 | N/A | N/A | ++++ | +++ |
| 597 | N/A | N/A | ++++ | +++ |
| 598 | N/A | N/A | ++++ | +++ |
| 600 | N/A | N/A | ++++ | ++++ |
| 602 | N/A | N/A | ++++ | ++++ |
| 603 | N/A | N/A | ++++ | ++++ |
| 604 | N/A | N/A | +++ | +++ |
| 608 | N/A | N/A | ++++ | +++ |
| 609 | N/A | N/A | ++++ | +++ |
| 610 | N/A | N/A | ++++ | +++ |
| 611 | N/A | N/A | ++++ | +++ |
| 612 | N/A | N/A | ++++ | +++ |
| 613 | N/A | N/A | ++++ | +++ |
| 615 | N/A | N/A | ++++ | ++++ |
| 433 | N/A | N/A | ++++ | +++ |
| 686 | N/A | N/A | ++++ | +++ |
| 687 | N/A | N/A | ++ | ++ |
| 595 | N/A | N/A | + | N/A |
| 665 | N/A | N/A | +++ | N/A |
| 708 | N/A | N/A | +++ | +++ |
| 710 | N/A | N/A | +++ | +++ |
| 711 | N/A | N/A | +++ | ++ |
| 712 | N/A | N/A | ++++ | ++++ |
| 713 | N/A | N/A | ++++ | ++++ |
| 716 | N/A | N/A | ++++ | ++++ |
| 765 | + | + | | |
| 766 | +++ | + | | |
| 752 | ++ | + | | |
| 753 | +++ | + | | |
| 754 | ++ | + | | |
| 755 | ++++ | + | | |
| 756 | +++ | + | | |
| 757 | ++++ | + | | |
| 758 | +++ | + | | |

### Example 12: Competition Binding ELISA Assay for MDM2 and MDMX

[0572] p53-His6 protein (“His6” disclosed as SEQ ID NO: 1948) (30 nM/well) was coated overnight at room temperature in the wells of 96-well plates. On the day of the experiment, the plates were washed with 1×PBS-Tween 20 (0.05%) using an automated ELISA plate washer and blocked with ELISA microwell blocking buffer for 30 minutes at room temperature. The excess blocking agent was washed off by washing the plates with 1×PBS-Tween 20 (0.05%). The peptides were diluted from 10 mM DMSO stock solutions to 500 μM working stock solutions using sterile water. Further dilutions were made in 0.5% DMSO to keep the concentration of DMSO constant across the samples. The peptide solutions were added to the wells at 2× the desired concentrations in 50 μL volumes, followed by addition of diluted GST-MDM2 or GST-HMDX protein (final concentration: 10 nM). The samples were incubated at room temperature for 2 h, and the plates were washed with PBS-Tween 20 (0.05%) prior to adding 100 μL of HRP-conjugated anti-GST antibody diluted to 0.5 μg/ml in HRP-stabilizing buffer. The plates were incubated with a detection antibody for 30 min, and the plates were washed and incubated with 100 μL per well of TMB-E substrate solution for up to 30 minutes. The reactions were stopped using 1M HCL, and absorbance was measured at 450 nm using a micro plate reader. The data were analyzed using Graph Pad PRISM software.

### Example 13: Cell Viability Assay

[0573] Cells were trypsinized, counted, and seeded at pre-determined densities in 96-well plates one day prior to conducting the cell viability assay. The following cell densities were used for each cell line: SJSA-1: 7500 cells/well; RKO: 5000 cells/well; RKO-E6: 5000 cells/well; HCT-116: 5000 cells/well; SW-480: 2000 cells/well; and MCF7: 5000 cells/well. On the day of cell viability assay, the media was replaced with fresh media containing 11% FBS (assay media) at room temperature. 180 μL of the assay media was added to each well. Control wells were prepared with no cells, and the control wells received 200 μL of media.

[0574] Peptide dilutions were made at room temperature, and the diluted peptide solutions were added to the cells at room temperature. 10 mM stock solutions of the peptides were prepared in DMSO. The stock solutions were serially diluted using a 1:3 dilution scheme to obtain 10 mM, 3.3 mM, 1.1 mM, 0.33 mM, 0.11 mM, 0.03 mM, and 0.01 mM solutions in DMSO. The serially DMSO-diluted peptides were diluted 33.3 times using sterile water, resulting in a range of 10× working stock solutions. A DMSO/sterile water (3% DMSO) solution was prepared for use in the control well. The working stock solution concentrations ranges were 300 μM, 100 μM, 30 μM, 10 μM, 3 μM, 1 μM, 0.3 μM, and 0 μM. The solutions were mixed well at each dilution step using a multichannel pipette.

[0575] Row H of the plate contained the controls. Wells H1-H3 received 20 μL of assay media. Rows H4-H9 received 20 μL of the 3% DMSO-water vehicle. Wells H10-H12 received media alone control with no cells. The MDM2 small molecule inhibitor Nutlin-3a (10 mM) was used as a positive control. Nutlin-3a was diluted using the same dilution scheme used for the peptides.

[0576] 20 μL of a 10× concentration peptide stock solution was added to the appropriate well to achieve the final concentration in 200 μL in each well. For example, 20 μL of 300 μM peptide solution+180 μL of cells in media=3 μM final concentration in 200 μL volume in wells. The solution was mixed gently a few times using a pipette. The final concentration range was 30 μM, 10 μM, 3 μM, 1 μM, 0.3 μM, 0.1 μM, 0.03 μM, and 0 μM. Further dilutions were used for potent peptides. Controls included wells that received no peptides but contained the same concentration of DMSO as the wells containing peptides and wells containing no cells. The plates were incubated for 72 hours at 37° C. in a humidified 5% CO₂ atmosphere.

[0577] The viability of the cells was determined using MTT reagent. The viability of SJSA-1, RKO, RKO-E6, HCT-116 cells was determined on day 3. The viability of MCF7 cells was determined on day 5. The viability of SW-480 cells was determined on day 6. At the end of the designated incubation time, the plates were cooled to room temperature. 80 L of assay media was removed from each well. 15 μL of thawed MTT reagent was then added to each well. The plate was incubated for 2 h at 37° C. in a humidified 5% CO₂ atmosphere. 100 μL of the solubilization reagent was added to each well. The plates were incubated with agitation for 1 h at room temperature and read using a multiplate reader for absorbance at 570 nm. Cell viability was analyzed against the DMSO controls.

[0578] Results from cell viability assays are shown in TABLE 6 and TABLE 7. “+” represents a value greater than 30 μM, “++” represents a value greater than 1 μM and less than or equal to 30 μM, “+++” represents a value greater than 5 μM and less than or equal to 15 μM, and “++++” represents a value of less than or equal to 5 μM. “IC₅₀ ratio” represents the ratio of average IC₅₀ in p53+/+ cells relative to average IC₅₀ in p53−/− cells.

TABLE 6

| SP# | SJSA-1 EC50 (72 h) |
|---|---|
| 3 | +++ |
| 4 | +++ |
| 5 | ++++ |
| 6 | ++ |
| 7 | ++++ |
| 8 | +++ |
| 9 | +++ |
| 10 | +++ |
| 11 | ++++ |
| 12 | ++ |
| 13 | +++ |
| 14 | + |
| 15 | ++ |
| 16 | + |
| 17 | + |
| 18 | + |
| 19 | ++ |
| 20 | + |
| 21 | + |
| 22 | + |
| 24 | +++ |
| 26 | ++++ |
| 28 | + |
| 29 | + |
| 30 | + |
| 32 | ++ |
| 38 | + |
| 39 | + |
| 40 | + |
| 41 | + |
| 42 | + |
| 43 | ++ |
| 45 | + |
| 46 | + |
| 47 | + |
| 48 | + |
| 49 | +++ |
| 50 | ++++ |
| 52 | + |
| 54 | + |
| 55 | + |
| 65 | ++++ |
| 68 | ++++ |
| 69 | ++++ |
| 70 | ++++ |
| 71 | ++++ |
| 72 | ++++ |
| 74 | ++++ |
| 75 | ++++ |
| 77 | ++++ |
| 78 | ++ |
| 80 | ++++ |
| 81 | +++ |
| 82 | +++ |
| 83 | +++ |
| 84 | + |
| 85 | +++ |
| 99 | ++++ |
| 102 | +++ |
| 103 | +++ |
| 104 | +++ |
| 105 | +++ |
| 108 | +++ |
| 109 | +++ |
| 110 | +++ |
| 111 | ++ |
| 114 | ++++ |
| 115 | ++++ |
| 118 | ++++ |
| 120 | ++++ |
| 121 | ++++ |
| 122 | ++++ |
| 123 | ++++ |
| 124 | +++ |
| 125 | ++++ |
| 126 | ++++ |
| 127 | ++++ |
| 128 | +++ |
| 129 | ++ |
| 130 | ++++ |
| 131 | +++ |
| 132 | ++++ |
| 133 | +++ |
| 134 | +++ |
| 135 | +++ |
| 136 | ++ |
| 137 | +++ |
| 139 | ++++ |
| 142 | +++ |
| 144 | ++++ |
| 147 | ++++ |
| 148 | ++++ |
| 149 | ++++ |
| 150 | ++++ |
| 152 | +++ |
| 153 | ++++ |
| 154 | ++++ |
| 155 | ++ |
| 156 | +++ |
| 157 | +++ |
| 158 | +++ |
| 160 | ++++ |
| 161 | ++++ |
| 162 | +++ |
| 163 | +++ |
| 166 | ++ |
| 167 | +++ |
| 168 | ++ |
| 169 | ++++ |
| 170 | ++++ |
| 171 | ++ |
| 173 | +++ |
| 174 | ++++ |
| 175 | +++ |
| 176 | +++ |
| 177 | ++++ |
| 179 | +++ |
| 180 | +++ |
| 181 | +++ |
| 182 | ++++ |
| 183 | ++++ |
| 184 | +++ |
| 185 | +++ |
| 186 | ++ |
| 188 | ++ |
| 190 | ++++ |
| 192 | +++ |
| 193 | ++ |
| 194 | + |
| 195 | ++++ |
| 196 | ++++ |
| 197 | ++++ |
| 198 | ++ |
| 199 | +++ |
| 200 | +++ |
| 201 | ++++ |
| 202 | +++ |
| 203 | ++++ |
| 204 | ++++ |
| 205 | ++ |
| 206 | ++ |
| 207 | +++ |
| 208 | +++ |
| 209 | ++++ |
| 210 | +++ |
| 211 | ++++ |
| 213 | ++++ |
| 214 | ++++ |
| 215 | ++++ |
| 216 | ++++ |
| 217 | ++++ |
| 218 | ++++ |
| 219 | ++++ |
| 220 | +++ |
| 221 | ++++ |
| 222 | +++ |
| 223 | ++++ |
| 224 | ++ |
| 225 | +++ |
| 226 | ++ |
| 227 | +++ |
| 228 | ++++ |
| 229 | ++++ |
| 230 | ++++ |
| 231 | ++++ |
| 232 | ++++ |
| 233 | ++++ |
| 234 | ++++ |
| 235 | ++++ |
| 236 | ++++ |
| 237 | ++++ |
| 238 | ++++ |
| 239 | +++ |
| 240 | ++ |
| 241 | +++ |
| 242 | ++++ |
| 243 | ++++ |
| 244 | ++++ |
| 245 | ++++ |
| 246 | +++ |
| 247 | ++++ |
| 248 | ++++ |
| 249 | ++++ |
| 250 | ++ |
| 251 | + |
| 252 | + |
| 253 | + |
| 254 | +++ |
| 255 | +++ |
| 256 | ++ |
| 257 | +++ |
| 258 | +++ |
| 259 | ++ |
| 260 | ++ |
| 261 | ++ |
| 262 | +++ |
| 263 | ++ |
| 264 | ++++ |
| 266 | +++ |
| 267 | ++++ |
| 270 | ++ |
| 271 | ++ |
| 272 | ++ |
| 276 | ++ |
| 277 | ++ |
| 278 | ++ |
| 279 | ++++ |
| 280 | +++ |
| 281 | ++ |
| 282 | ++ |
| 283 | ++ |
| 284 | ++++ |
| 289 | ++++ |
| 290 | +++ |
| 291 | ++++ |
| 292 | ++++ |
| 293 | ++++ |
| 294 | ++++ |
| 295 | +++ |
| 296 | ++++ |
| 297 | +++ |
| 298 | ++++ |
| 300 | ++++ |
| 301 | ++++ |
| 302 | ++++ |
| 303 | ++++ |
| 304 | ++++ |
| 305 | ++++ |
| 306 | ++++ |
| 307 | +++ |
| 308 | ++++ |
| 309 | +++ |
| 310 | ++++ |
| 312 | ++++ |
| 313 | ++++ |
| 314 | ++++ |
| 315 | ++++ |
| 316 | ++++ |
| 317 | ++++ |
| 318 | ++++ |
| 319 | ++++ |
| 320 | ++++ |
| 321 | ++++ |
| 322 | ++++ |
| 323 | ++++ |
| 324 | ++++ |
| 326 | ++++ |
| 327 | ++++ |
| 328 | ++++ |
| 329 | ++++ |
| 330 | ++++ |
| 331 | ++++ |
| 332 | ++++ |
| 333 | ++ |
| 334 | +++ |
| 335 | ++++ |
| 336 | ++++ |
| 337 | ++++ |
| 338 | ++++ |
| 339 | ++++ |
| 340 | ++++ |
| 341 | ++++ |
| 342 | ++++ |
| 343 | ++++ |
| 344 | ++++ |
| 345 | ++++ |
| 346 | ++++ |
| 347 | ++++ |
| 348 | ++++ |
| 349 | ++++ |
| 350 | ++++ |
| 351 | ++++ |
| 352 | ++++ |
| 353 | ++++ |
| 355 | ++++ |
| 357 | ++++ |
| 358 | ++++ |
| 359 | ++++ |
| 360 | ++++ |
| 361 | +++ |
| 362 | ++++ |
| 363 | ++++ |
| 364 | ++++ |
| 365 | +++ |
| 366 | ++++ |
| 367 | ++++ |
| 368 | + |
| 369 | ++++ |
| 370 | ++++ |
| 371 | ++++ |
| 372 | +++ |
| 373 | +++ |
| 374 | ++++ |
| 375 | ++++ |
| 376 | ++++ |
| 377 | ++++ |
| 378 | ++++ |
| 379 | ++++ |
| 380 | ++++ |
| 381 | ++++ |
| 382 | ++++ |
| 386 | +++ |
| 388 | ++ |
| 390 | ++++ |
| 392 | +++ |
| 394 | +++ |
| 396 | +++ |
| 398 | +++ |
| 402 | +++ |
| 404 | +++ |
| 408 | ++++ |
| 410 | +++ |
| 411 | +++ |
| 412 | + |
| 421 | +++ |
| 423 | ++++ |
| 425 | ++++ |
| 427 | ++++ |
| 434 | +++ |
| 435 | ++++ |
| 436 | ++++ |
| 437 | ++++ |
| 438 | ++++ |
| 439 | ++++ |
| 440 | ++++ |
| 441 | ++++ |
| 442 | ++++ |
| 443 | ++++ |
| 444 | +++ |
| 445 | ++++ |
| 449 | ++++ |
| 551 | ++++ |
| 552 | ++++ |
| 554 | + |
| 555 | ++++ |
| 586 | ++++ |
| 587 | ++++ |
| 588 | ++++ |
| 589 | +++ |
| 432 | ++++ |
| 672 | + |
| 673 | ++ |
| 682 | + |
| 686 | + |
| 557 | ++++ |
| 558 | ++++ |
| 560 | + |
| 561 | ++++ |
| 562 | ++++ |
| 563 | ++++ |
| 564 | ++++ |
| 566 | ++++ |
| 567 | ++++ |
| 568 | +++ |
| 569 | ++++ |
| 571 | ++++ |
| 572 | ++++ |
| 573 | ++++ |
| 574 | ++++ |
| 575 | ++++ |
| 576 | ++++ |
| 577 | ++++ |
| 578 | ++++ |
| 585 | ++++ |
| 687 | + |
| 662 | ++++ |
| 663 | ++++ |
| 553 | +++ |
| 559 | ++++ |
| 579 | ++++ |
| 581 | ++++ |
| 582 | ++ |
| 582 | ++++ |
| 584 | +++ |
| 675 | ++++ |
| 676 | ++++ |
| 677 | + |
| 679 | ++++ |
| 700 | +++ |
| 704 | +++ |
| 591 | + |
| 706 | ++ |
| 695 | ++ |
| 595 | ++++ |
| 596 | ++++ |
| 597 | +++ |
| 598 | +++ |
| 599 | ++++ |
| 600 | ++++ |
| 601 | +++ |
| 602 | +++ |
| 603 | +++ |
| 604 | +++ |
| 606 | ++++ |
| 607 | ++++ |
| 608 | ++++ |
| 610 | ++++ |
| 611 | ++++ |
| 612 | ++++ |
| 613 | +++ |
| 614 | +++ |
| 615 | ++++ |
| 618 | ++++ |
| 619 | ++++ |
| 707 | ++++ |
| 620 | ++++ |
| 621 | ++++ |
| 622 | ++++ |
| 623 | ++++ |
| 624 | ++++ |
| 625 | ++++ |
| 626 | +++ |
| 631 | ++++ |
| 633 | ++++ |
| 634 | ++++ |
| 635 | +++ |
| 636 | +++ |
| 638 | + |
| 641 | +++ |
| 665 | ++++ |
| 708 | ++++ |
| 709 | +++ |
| 710 | + |
| 711 | ++++ |
| 712 | ++++ |
| 713 | ++++ |
| 714 | +++ |
| 715 | +++ |
| 716 | ++++ |
| 765 | + |
| 753 | + |
| 754 | + |
| 755 | + |
| 756 | + |
| 757 | ++++ |
| 758 | +++ |

TABLE 7

| | HCT-116 | RKO | RKO-E6 | SW480 | |
|---|---|---|---|---|---|
| | EC50 | EC₅₀ | EC₅₀ | EC50 | IC₅₀ |
| SP# | (72 h) | (72 h) | (72 h) | (6 days) | Ratio |
| 4 | ++++ | ++++ | +++ | ++++ | |
| 5 | ++++ | ++++ | +++ | ++++ | |
| 7 | ++++ | ++++ | +++ | ++++ | |
| 10 | ++++ | +++ | +++ | +++ | |
| 11 | ++++ | ++++ | ++ | +++ | |
| 50 | ++++ | ++++ | ++ | +++ | |
| 65 | +++ | +++ | +++ | +++ | |
| 69 | ++++ | ++++ | + | ++++ | |
| 70 | ++++ | ++++ | ++ | +++ | |
| 71 | ++++ | ++++ | +++ | +++ | |
| 81 | +++ | +++ | +++ | +++ | |
| 99 | ++++ | ++++ | +++ | ++++ | |
| 109 | ++++ | ++++ | ++ | +++ | |
| 114 | | +++ | + | +++ | |
| 115 | | +++ | + | +++ | 1-29 |
| 118 | +++ | ++++ | + | ++++ | |
| 120 | ++++ | ++++ | + | ++++ | |
| 121 | ++++ | ++++ | + | ++++ | |
| 122 | | +++ | + | +++ | 1-29 |
| 125 | +++ | +++ | + | + | |
| 126 | + | + | + | + | |
| 148 | | ++ | + | + | |
| 150 | | ++ | + | + | |
| 153 | +++ | | + | | |
| 154 | +++ | +++ | + | + | 30-49 |
| 158 | + | + | + | + | |
| 160 | +++ | + | + | + | 1-29 |
| 161 | +++ | + | + | + | |
| 175 | + | + | + | + | |
| 196 | ++++ | ++++ | +++ | ++++ | |
| 219 | ++++ | +++ | + | + | 1-29 |
| 233 | ++++ | | | | |
| 237 | ++++ | | + | + | |
| 238 | ++++ | | + | + | |
| 243 | ++++ | | + | + | |
| 244 | ++++ | | + | + | >50 |
| 245 | ++++ | | + | + | |
| 247 | ++++ | | + | + | |
| 249 | ++++ | ++++ | + | + | >50 |
| 255 | ++++ | | + | | |
| 291 | | | + | | |
| 293 | +++ | | + | | |
| 303 | +++ | | + | | 1-29 |
| 305 | | | + | | |
| 306 | ++++ | | + | | |
| 310 | ++++ | | + | | |
| 312 | ++++ | | | | |
| 313 | ++++ | | ++ | | |
| 314 | | | + | | |
| 315 | ++++ | ++++ | ++ | ++++ | >50 |
| 316 | ++++ | ++++ | + | +++ | >50 |
| 317 | +++ | | + | ++ | |
| 321 | ++++ | | + | | |
| 324 | +++ | | + | | |
| 325 | +++ | | | | |
| 326 | +++ | | + | | |
| 327 | +++ | | + | | |
| 328 | +++ | | ++ | | |
| 329 | ++++ | | + | | |
| 330 | | | + | | |
| 331 | ++++ | ++++ | + | + | >50 |
| 338 | ++++ | ++++ | ++ | +++ | |
| 341 | +++ | ++ | + | + | |
| 343 | +++ | | + | + | |
| 346 | ++++ | | + | + | |
| 347 | +++ | | + | + | |
| 349 | ++++ | +++ | + | + | 30-49 |
| 350 | ++++ | | + | + | |
| 351 | ++++ | +++ | + | + | 30-49 |
| 353 | ++ | ++ | + | + | |
| 355 | ++++ | ++ | + | + | 1-29 |
| 357 | ++++ | ++++ | + | + | |
| 358 | ++++ | ++ | + | + | |
| 359 | ++++ | ++ | + | + | |
| 367 | ++++ | | + | + | 30-49 |
| 386 | ++++ | ++++ | ++++ | ++++ | |
| 388 | ++ | ++ | + | +++ | 1-29 |
| 390 | ++++ | ++++ | +++ | ++++ | |
| 435 | +++ | ++ | + | | |
| 436 | ++++ | ++++ | ++ | | |
| 437 | ++++ | ++++ | ++ | ++++ | 30-49 |
| 440 | ++ | ++ | + | | |
| 442 | ++++ | ++++ | ++ | | |
| 444 | ++++ | ++++ | +++ | | |
| 445 | ++++ | +++ | + | + | >50 |
| 555 | | | | | >50 |
| 557 | | | | | >50 |
| 558 | | | | | 30-49 |
| 562 | | | | | 30-49 |
| 564 | | | | | 30-49 |
| 566 | | | | | 30-49 |
| 567 | | | | | >50 |
| 572 | | | | | >50 |
| 573 | | | | | 30-49 |
| 578 | | | | | 30-49 |
| 662 | | | | | >50 |
| 379 | | | | | 1-29 |
| 375 | | | | | 1-29 |
| 559 | | | | | >50 |
| 561 | | | | | 1-29 |
| 563 | | | | | 1-29 |
| 568 | | | | | 1-29 |
| 569 | | | | | 1-29 |
| 571 | | | | | 1-29 |
| 574 | | | | | 1-29 |
| 575 | | | | | 1-29 |
| 576 | | | | | 1-29 |
| 577 | | | | | 30-49 |
| 433 | | | | | 1-29 |
| 551 | | | | | 30-49 |
| 553 | | | | | 1-29 |
| 710 | | | | + | |
| 711 | | | | + | |
| 712 | | | | ++ | |
| 713 | | | | ++ | |
| 714 | | | | +++ | |
| 715 | | | | +++ | |
| 716 | | | | + | |

### Example 14: p²¹ ELISA Assay

[0579] SJSA-1 cells were trypsinized, counted, and seeded at a density of 7500 cells/100 μL/well in 96-well plates one day prior to running the assay. On the day of the assay, the media was replaced with fresh RPMI-11% FBS assay media. 90 μL of the assay media was added to each well. The control wells contained no cells and received 100 μL of the assay media.

[0580] 10 mM stock solutions of the peptides were prepared in DMSO. The stock solutions were serially diluted using a 1:3 dilution scheme to obtain 10 mM, 3.3 mM, 1.1 mM, 0.33 mM, 0.11 mM, 0.03 mM, and 0.01 mM solutions in DMSO. The solutions were serially diluted 33.3 times using sterile water to provide a range of 10× working stock solutions. A DMSO/sterile water (3% DMSO) solution was prepared for use in the control wells. The working stock solution concentration range was 300 μM, 100 μM, 30 μM, 10 μM, 3 μM, 1 μM, 0.3 μM, and 0 μM. Each solution was mixed well at each dilution step using a multichannel pipette. Row H contained the control wells. Wells H1-H3 received 10 μL of the assay media. Wells H4-H9 received 10 μL of the 3% DMSO-water solution. Wells H10-H12 received media alone and contained no cells. The MDM2 small molecule inhibitor Nutlin-3a (10 mM) was used as a positive control. Nutlin-3a was diluted using the same dilution scheme used for the peptides.

[0581] 10 μL of a 10× peptide solution was added to the appropriate well to achieve a final concentration in a volume of 100 μL. For example, 10 μL of 300 μM peptide+90 μL of cells in media=30 μM final concentration in 100 μL volume in wells. The final concentration range used was 30 μM, 10 μM, 3 μM, 1 μM, 0.3 μM, and 0 μM. Control wells included wells that did not receive peptides but contained the same concentration of DMSO as the wells containing the peptides and wells containing no cells.

[0582] 20 h after incubation, the media was aspirated from the wells. The cells were washed with 1×PBS (without Cα++/Mg⁺) and lysed in 60 μL of 1× cell lysis buffer (10× buffer diluted to 1× and supplemented with protease inhibitors and phosphatase inhibitors) on ice for 30 min. The plates were centrifuged at 5000 rpm at 4° C. for 8 min. The clear supernatants were collected and frozen at −80° C. until further use. The total protein contents of the lysates were measured using a BCA protein detection kit and BSA standards. Each well provided about 6-7 μg of protein. 50 μL of the lysate was used per well to set up the p21 ELISA assay. For the human total p21 ELISA assay, 50 μL of lysate was used for each well, and each well was set up in triplicate.

### Example 15: Caspase 3 Detection Assay

[0583] SJSA-1 cells were trypsinized, counted, and seeded at a density of 7500 cells/100 μL/well in 96-well plates one day prior to conducting the assay. One the day of the assay, the media was replaced with fresh RPMI-11% FBS assay media. 180 μL of the assay media was added to each well. Control wells contained no cells and received 200 μL of the assay media.

[0584] 10 mM stock solutions of the peptides were prepared in DMSO. The stock solutions were serially diluted using a 1:3 dilution scheme to obtain 10 mM, 3.3 mM, 1.1 mM, 0.33 mM, 0.11 mM, 0.03 mM, and 0.01 mM solutions in DMSO. The solutions were serially diluted 33.3 times using sterile water to provide a range of 10× working stock solutions. A DMSO/sterile water (3% DMSO) solution was prepared for use in the control wells. The working stock solution concentration range was 300 μM, 100 μM, 30 μM, 10 μM, 3 μM, 1 μM, 0.3 μM, and 0 μM. Each well was mixed well at each dilution step using a multichannel pipette. 20 μL of the 10× working stock solutions were added to the appropriate wells. Row H of the plates had control wells. Wells H1-H3 received 20 μL of the assay media. Wells H4-H9 received 20 μL of the 3% DMSO-water solutions. Wells H10-H12 received media and had no cells. The MDM2 small molecule inhibitor Nutlin-3a (10 mM) was used as a positive control. Nutlin-3a was diluted using the same dilution scheme as the peptides.

[0585] 10 μL of the 10× stock solutions were added to the appropriate wells to achieve the final concentrations in a total volume of 100 μL. For example, 10 μL of 300 μM peptide+90 μL of cells in media=30 μM final concentration in 100 μL volume in wells. The final concentration range used was 30 μM, 10 μM, 3 μM, 1 μM, 0.3 μM, and 0 μM. Control wells contained no peptides but contained the same concentration of DMSO as the wells containing the peptides and well containing no cells. 48 h after incubation, 80 L of the media was aspirated from each well. 100 μL of Caspase 3/7Glo assay reagent was added to each well. The plates were incubated with gentle shaking for 1 h at room temperature and read using a multi-plate reader for luminescence. Data were analyzed as Caspase 3 activation over DMSO-treated cells. Results from EXAMPLE 14 and EXAMPLE 15 are shown in TABLE 8.

TABLE 8

| | caspase | caspase | caspase | caspase | caspase | p21 | p21 | p21 | p21 | p21 |
|---|---|---|---|---|---|---|---|---|---|---|
| SP# | 0.3 μM | 1 μM | 3 μM | 10 μM | 30 μM | 0.3 μM | 1 μM | 3 μM | 10 μM | 30 μM |
| 4 | | | 9 | 37 | 35 | | | 317 | 3049 | 3257 |
| 7 | 0.93 | 1.4 | 5.08 | 21.7 | 23.96 | | 18 | 368 | 1687 | 2306 |
| 8 | | | 1 | 19 | 25 | | | 34 | 972 | 2857 |
| 10 | 1 | | 1 | 17 | 32 | | 10 | 89 | 970 | 2250 |
| 11 | 1 | | 5 | 23 | 33.5 | | 140 | 350 | 2075.5 | 3154 |
| 26 | 1 | | 1 | 3 | 14 | | | | | |
| 50 | | | 8 | 29 | 29 | | 44 | 646 | 1923 | 1818 |
| 65 | 1 | | 6 | 28 | 34 | −69 | −24 | 122 | 843 | 1472 |
| 69 | 4.34 | 9.51 | 16.39 | 26.59 | 26.11 | 272 | 458.72 | 1281.39 | 2138.88 | 1447.22 |
| 70 | | | 1 | 9 | 26 | | −19 | 68 | 828 | 1871 |
| 71 | 0.95 | 1.02 | 3.68 | 14.72 | 23.52 | | 95 | 101 | 1204 | 2075 |
| 72 | 1 | | 1 | 4 | 10 | −19 | 57 | 282 | 772 | 1045 |
| 77 | 1 | | 2 | 19 | 23 | | | | | |
| 80 | 1 | | 2 | 13 | 20 | | | | | |
| 81 | 1 | | 1 | 6 | 21 | | 0 | 0 | 417 | 1649 |
| 99 | 1 | | 7 | 31 | 33 | −19 | 117 | 370 | 996 | 1398 |
| 109 | | | 4 | 16 | 25 | | 161 | 445 | 1221 | 1680 |
| 114 | 1 | | 6 | 28 | 34 | −21 | 11 | 116 | 742 | 910 |
| 115 | 1 | | 10 | 26 | 32 | −10 | 36 | 315 | 832 | 1020 |
| 118 | 1 | | 2 | 18 | 27 | −76 | −62 | −11 | 581 | 1270 |
| 120 | 2 | | 11 | 20 | 30 | −4 | 30 | 164 | 756 | 1349 |
| 121 | 1 | | 5 | 19 | 30 | 9 | 33 | 81 | 626 | 1251 |
| 122 | 1 | | 2 | 15 | 30 | −39 | −18 | 59 | 554 | 1289 |
| 123 | 1 | | 1 | 6 | 14 | | | | | |
| 125 | 1 | | 3 | 9 | 29 | 50 | 104 | 196 | 353 | 1222 |
| 126 | 1 | | 1 | 6 | 30 | −47 | −10 | 90 | 397 | 1443 |
| 127 | 1 | | 1 | 4 | 13 | | | | | |
| 130 | 1 | | 2 | 6 | 17 | | | | | |
| 139 | 1 | | 2 | 9 | 18 | | | | | |
| 142 | 1 | | 2 | 15 | 20 | | | | | |
| 144 | 1 | | 4 | 10 | 16 | | | | | |
| 148 | 1 | | 11 | 23 | 31 | −23 | 55 | 295 | 666 | 820 |
| 149 | 1 | | 2 | 4 | 10 | 35 | 331 | 601 | 1164 | 1540 |
| 150 | 2 | | 11 | 19 | 35 | −37 | 24 | 294 | 895 | 906 |
| 153 | 2 | | 10 | 15 | 20 | | | | | |
| 154 | 2.68 | 4 | 13.93 | 19.86 | 30.14 | 414.04 | 837.45 | 1622.42 | 2149.51 | 2156.98 |
| 158 | 1 | | 1.67 | 5 | 16.33 | −1.5 | 95 | 209.5 | 654 | 1665.5 |
| 160 | 2 | | 10 | 16 | 31 | −43 | 46 | 373 | 814 | 1334 |
| 161 | 2 | | 8 | 14 | 22 | 13 | 128 | 331 | 619 | 1078 |
| 170 | 1 | | 1 | 16 | 20 | | | | | |
| 175 | 1 | | 5 | 12 | 21 | −65 | 1 | 149 | 543 | 1107 |
| 177 | 1 | | 1 | 8 | 20 | | | | | |
| 183 | 1 | | 1 | 4 | 8 | −132 | −119 | −14 | 1002 | 818 |
| 196 | 1 | | 4 | 33 | 26 | −49 | −1 | 214 | 1715 | 687 |
| 197 | 1 | | 1 | 10 | 20 | | | | | |
| 203 | 1 | | 3 | 12 | 10 | 77 | 329 | 534 | 1805 | 380 |
| 204 | 1 | | 4 | 10 | 10 | 3 | 337 | 928 | 1435 | 269 |
| 218 | 1 | | 2 | 8 | 18 | | | | | |
| 219 | 1 | | 5 | 17 | 34 | 28 | 53 | 289 | 884 | 1435 |
| 221 | 1 | | 3 | 6 | 12 | 127 | 339 | 923 | 1694 | 1701 |
| 223 | 1 | | 1 | 5 | 18 | | | | | |
| 230 | 1 | | 2 | 3 | 11 | 245.5 | 392 | 882 | 1549 | 2086 |
| 233 | 6 | 8 | 17 | 22 | 23 | 2000 | 2489 | 3528 | 3689 | 2481 |
| 237 | 1 | | 5 | 9 | 15 | 0 | 0 | 2 | 284 | 421 |
| 238 | 1 | | 2 | 4 | 21 | 0 | 149 | 128 | 825 | 2066 |
| 242 | 1 | | 4 | 5 | 18 | 0 | 0 | 35 | 577 | 595 |
| 243 | 1 | | 2 | 5 | 23 | 0 | 0 | 0 | 456 | 615 |
| 244 | 1 | | 2 | 7 | 17 | 0 | 178 | 190 | 708 | 1112 |
| 245 | 1 | | 3 | 9 | 16 | 0 | 0 | 0 | 368 | 536 |
| 247 | 1 | | 3 | 11 | 24 | 0 | 0 | 49 | 492 | 699 |
| 248 | | | | | | 0 | 50 | 22 | 174 | 1919 |
| 249 | 2 | | 5 | 11 | 23 | 0 | 0 | 100 | 907 | 1076 |
| 251 | | | | | | 0 | 0 | 0 | 0 | 0 |
| 252 | | | | | | 0 | 0 | 0 | 0 | 0 |
| 253 | | | | | | 0 | 0 | 0 | 0 | 0 |
| 254 | 1 | 3 | 7 | 14 | 22 | 118 | 896 | 1774 | 3042 | 3035 |
| 286 | 1 | 4 | 11 | 20 | 22 | 481 | 1351 | 2882 | 3383 | 2479 |
| 287 | 1 | 1 | 3 | 11 | 23 | 97 | 398 | 986 | 2828 | 3410 |
| 315 | 11 | 14.5 | 25.5 | 32 | 34 | 2110 | 2209 | 2626 | 2965 | 2635 |
| 316 | 6.5 | 10.5 | 21 | 32 | 32.5 | 1319 | 1718 | 2848 | 2918 | 2540 |
| 317 | 3 | 4 | 9 | 26 | 35 | 551 | 624 | 776 | 1367 | 1076 |
| 331 | 4.5 | 8 | 11 | 14.5 | 30.5 | 1510 | 1649 | 2027 | 2319 | 2509 |
| 338 | 1 | 5 | 23 | 20 | 29 | 660.37 | 1625.38 | 3365.87 | 2897.62 | 2727 |
| 341 | 3 | 8 | 11 | 14 | 21 | 1325.62 | 1873 | 2039.75 | 2360.75 | 2574 |
| 343 | 1 | 1 | 2 | 5 | 29 | 262 | 281 | 450 | 570 | 1199 |
| 346 | | | | | | 235.86 | 339.82 | 620.36 | 829.32 | 1695.78 |
| 347 | 2 | 3 | 5 | 8 | 29 | 374 | 622 | 659 | 905 | 1567 |
| 349 | 1 | 8 | 11 | 16 | 24 | 1039.5 | 1598.88 | 1983.75 | 2191.25 | 2576.38 |
| 351 | 3 | 9 | 13 | 15 | 24 | 1350.67 | 1710.67 | 2030.92 | 2190.67 | 2668.54 |
| 353 | 1 | 2 | 5 | 7 | 30 | 390 | 490 | 709 | 931 | 1483 |
| 355 | 1 | 4 | 11 | 13 | 30 | 191 | 688 | 1122 | 1223 | 1519 |
| 357 | 2 | 7 | 11 | 15 | 23 | 539 | 777 | 1080 | 1362 | 1177 |
| 358 | 1 | 2 | 3 | 6 | 24 | 252 | 321 | 434 | 609 | 1192 |
| 359 | 3 | 9 | 11 | 13 | 23 | 1163.29 | 1508.79 | 1780.29 | 2067.67 | 2479.29 |
| 416 | | | | | | 33.74 | 39.82 | 56.57 | 86.78 | 1275.28 |
| 417 | | | | | | 0 | 0 | 101.13 | 639.04 | 2016.58 |
| 419 | | | | | | 58.28 | 97.36 | 221.65 | 1520.69 | 2187.94 |
| 432 | | | | | | 54.86 | 68.86 | 105.11 | 440.28 | 1594.4 |

### Example 16: Cell Lysis by Peptidomimetic Macrocycles

[0586] SJSA-1 cells were plated out one day in advance in clear, flat-bottom plates at a density of 7500 cells/well with 100 μL/well of growth media. Row H columns 10-12 were left empty to be treated with media alone. On the day of the assay, the media was exchanged with RPMI 1% FBS media to result in 90 μL of media per well. 10 mM stock solutions of the peptidomimetic macrocycles were prepared in 100% DMSO. The peptidomimetic macrocycles were diluted serially in 100% DMSO, and further diluted 20-fold in sterile water to prepare working stock solutions in 5% DMSO/water. The concentrations of the peptidomimetic macrocycles ranged from 500 μM to 62. μM.

[0587] 10 μL of each compound solution was added to the 90 μL of SJSA-1 cells to yield final concentration of 50 μM to 6.25 μM in 0.5% DMSO-containing media. The negative control (non-lytic sample) was 0.5% of DMSO alone. The positive control (lytic) samples included 10 μM of Melittin and 1% Triton X-100. The cell plates were incubated for 1 h at 37° C. After incubation for 1 h, the morphology of the cells was examined by microscope. The plates were then centrifuged at 1200 rpm for 5 min at room temperature. 40 μL of the supernatant for each peptidomimetic macrocycle and control sample was transferred to clear assay plates. LDH release was measured using an LDH cytotoxicity assay kit. The results of the cell lysis assay are shown in TABLE 9:

TABLE 9

| | 6.25 μM % | 12.5 μM % | 25 μM % | 50 μM % |
|---|---|---|---|---|
| | Lysed cells | Lysed cells | Lysed cells | Lysed cells |
| SP# | (1 h LDH) | (1 h LDH) | (1 h LDH) | (1 h LDH) |
| 3 | 1 | 0 | 1 | 3 |
| 4 | −2 | 1 | 1 | 2 |
| 6 | 1 | 1 | 1 | 1 |
| 7 | 0 | 0 | 0 | 0 |
| 8 | −1 | 0 | 1 | 1 |
| 9 | −3 | 0 | 0 | 2 |
| 11 | −2 | 1 | 2 | 3 |
| 15 | 1 | 2 | 2 | 5 |
| 18 | 0 | 1 | 2 | 4 |
| 19 | 2 | 2 | 3 | 21 |
| 22 | 0 | −1 | 0 | 0 |
| 26 | 2 | 5 | −1 | 0 |
| 32 | 0 | 0 | 2 | 0 |
| 39 | 0 | −1 | 0 | 3 |
| 43 | 0 | 0 | −1 | −1 |
| 55 | 1 | 5 | 9 | 13 |
| 65 | 0 | 0 | 0 | 2 |
| 69 | 1 | 0.5 | −0.5 | 5 |
| 71 | 0 | 0 | 0 | 0 |
| 72 | 2 | 1 | 0 | 3 |
| 75 | −1 | 3 | 1 | 1 |
| 77 | −2 | −2 | 1 | −1 |
| 80 | 0 | 1 | 1 | 5 |
| 81 | 1 | 1 | 0 | 0 |
| 82 | 0 | 0 | 0 | 1 |
| 99 | 1.5 | 3 | 2 | 3.5 |
| 108 | 0 | 0 | 0 | 1 |
| 114 | 3 | −1 | 4 | 9 |
| 115 | 0 | 1 | −1 | 6 |
| 118 | 4 | 2 | 2 | 4 |
| 120 | 0 | −1 | 0 | 6 |
| 121 | 1 | 0 | 1 | 7 |
| 122 | 1 | 3 | 0 | 6 |
| 123 | −2 | 2 | 5 | 3 |
| 125 | 0 | 1 | 0 | 2 |
| 126 | 1 | 2 | 1 | 1 |
| 130 | 1 | 3 | 0 | −1 |
| 139 | −2 | −3 | −1 | −1 |
| 142 | 1 | 0 | 1 | 3 |
| 144 | 1 | 2 | −1 | 2 |
| 147 | 8 | 9 | 16 | 55 |
| 148 | 0 | 1 | −1 | 0 |
| 149 | 6 | 7 | 7 | 21 |
| 150 | −1 | −2 | 0 | 2 |
| 153 | 4 | 3 | 2 | 3 |
| 154 | −1 | −1.5 | −1 | −1 |
| 158 | 0 | −6 | −2 | |
| 160 | −1 | 0 | −1 | 1 |
| 161 | 1 | 1 | −1 | 0 |
| 169 | 2 | 3 | 3 | 7 |
| 170 | 2 | 2 | 1 | −1 |
| 174 | 5 | 3 | 2 | 5 |
| 175 | 3 | 2 | 1 | 0 |
| 177 | −1 | −1 | 0 | 1 |
| 182 | 0 | 2 | 3 | 6 |
| 183 | 2 | 1 | 0 | 3 |
| 190 | −1 | −1 | 0 | 1 |
| 196 | 0 | −2 | 0 | 3 |
| 197 | 1 | −4 | −1 | −2 |
| 203 | 0 | −1 | 2 | 2 |
| 204 | 4 | 3 | 2 | 0 |
| 211 | 5 | 4 | 3 | 1 |
| 217 | 2 | 1 | 1 | 2 |
| 218 | 0 | −3 | −4 | 1 |
| 219 | 0 | 0 | −1 | 2 |
| 221 | 3 | 3 | 3 | 11 |
| 223 | −2 | −2 | −4 | −1 |
| 230 | 0.5 | −0.5 | 0 | 3 |
| 232 | 6 | 6 | 5 | 5 |
| 233 | 2.5 | 4.5 | 3.5 | 6 |
| 237 | 0 | 3 | 7 | 55 |
| 243 | 4 | 23 | 39 | 64 |
| 244 | 0 | 1 | 0 | 4 |
| 245 | 1 | 14 | 11 | 56 |
| 247 | 0 | 0 | 0 | 4 |
| 249 | 0 | 0 | 0 | 0 |
| 254 | 11 | 34 | 60 | 75 |
| 279 | 6 | 4 | 5 | 6 |
| 280 | 5 | 4 | 6 | 18 |
| 284 | 5 | 4 | 5 | 6 |
| 286 | 0 | 0 | 0 | 0 |
| 287 | 0 | 6 | 11 | 56 |
| 316 | 0 | 1 | 0 | 1 |
| 317 | 0 | 1 | 0 | 0 |
| 331 | 0 | 0 | 0 | 0 |
| 335 | 0 | 0 | 0 | 1 |
| 336 | 0 | 0 | 0 | 0 |
| 338 | 0 | 0 | 0 | 1 |
| 340 | 0 | 2 | 0 | 0 |
| 341 | 0 | 0 | 0 | 0 |
| 343 | 0 | 1 | 0 | 0 |
| 347 | 0 | 0 | 0 | 0 |
| 349 | 0 | 0 | 0 | 0 |
| 351 | 0 | 0 | 0 | 0 |
| 353 | 0 | 0 | 0 | 0 |
| 355 | 0 | 0 | 0 | 0 |
| 357 | 0 | 0 | 0 | 0 |
| 359 | 0 | 0 | 0 | 0 |
| 413 | 5 | 3 | 3 | 3 |
| 414 | 3 | 3 | 2 | 2 |
| 415 | 4 | 4 | 2 | 2 |

### Example 17: Mechanistic Rationale for Peptidomimetic Macrocycles as Myelopreservation Agents

[0588] The cytotoxicity of some chemotherapeutic agents (e.g. topoisomerase inhibitors) is reduced in cells that are not actively dividing. In cells with wild-type p53, p53 activation via administration of a peptidomimetic macrocycle can induce transient, dose-dependent cell cycle arrest, as shown in FIG. 2. Induction of cell cycle arrest can reduce sensitivity to chemotherapy induced cytotoxicity. The cell cycle of p53 mutant cancer cells is unaffected by the peptidomimetic macrocycle leaving the cells vulnerable to the cytotoxic effects of the chemotherapy, as shown in FIG. 3.

[0589] FIG. 4, presents data that shows the effect of AP-1 in p53 wild type cells vs. p53 mutant cells. Various cell lines were grown in RPMI1640, 10% FBS, 2 mM L-alanyl-L-Glutamine, 1 mM Na pyruvate or a special medium in a humidified atmosphere of 5% CO2 at 37° C. Cells were seeded in 384 well plates and AP-1 was added to cells 24 hours post seeding. AP-1 was serially diluted 3.16-fold and assayed over 10 concentrations. 16-bit TIFF images were collected with 4× objective. EC50 values were calculated using non-linear regression to fit data to a sigmoidal 4-point, 4 parameter one-site dose response model, where: y (fit)=A+[(B−A)/(1+((C/x)\hat{ }D))]. As can be seen in FIG. 4, the EC50 of AP-1 was increased in p53 mutant cell lines compared to cell lines with wild-type p53.

### Example 18: Effect of AP-1 on Cell Death and Cell Cycle Arrest in p53-WT MOLM13 Cells

[0590] MOLM13 cells were cultured in vitro and treated with a vehicle control or varying concentrations of AP-1 for 24 hours. After the treatment period, the effects of AP-1 on cell cycle arrest and apoptosis were analyzed by propidium iodide and annexin V staining, respectively. As can be seen in FIG. 5, AP-1 triggered dose dependent apoptosis. When cells were treated with 1 μM AP-1, cell cycle arrest was induced in cells.

### Example 19: Induction of Cell Cycle Arrest by AP-1 in CD34⁺ Bone Marrow Cells

[0591] CD34⁺ bone marrow cells were cultured and treated with various concentrations of AP-1. DNA synthesis and the percentage of cells in S-phase was detected via EdU staining of cells as measured via flow cytometry. Results are shown in FIG. 6 and indicate that treatment with AP-1 decreased DNA synthesis and the percentage of cells in S-phase compared to vehicle controls.

### Example 20: Reversibility of AP-1 Induced Cell Cycle Arrest in Bone Marrow CD34+ Cells

[0592] Two groups of bone marrow CD34+ cells were incubated with 1 μM AP-1 or vehicle control in vitro for 24 hours. Cell cycle arrest was assessed via EdU staining and flow cytometry immediately following AP-1 incubation for one group of bone marrow CD34+ cells (Group 1) and 24 hours after washing out AP-1 in a second group (Group 2). As can be seen in FIG. 7, a decrease in the percentage of cells in S-phase compared to vehicle control for cells in Group 1 was observed, but not for cells in Group 2 as measured via EdU staining and flow cytometry. These results indicate that AP-1 induces transient, reversible cell cycle arrest in human bone marrow cells.

### Example 21: Protection Against Topotecan-Induced DNA Damage

[0593] Bone marrow CD34+ cells were treated with 1 μM AP-1 or vehicle control in vitro for 24 hours. Following treatment with AP-1 or vehicle, cells were washed and treated with 1 μM topotecan for 24 hours. DNA damage in topotecan incubated cells was then assessed via measurement of γ-H2AX. As can be seen in FIG. 8, pre-treatment with AP-1 reduced topotecan induced DNA damaged compared to cells pre-treated with vehicle control as indicated by a decrease in γ-H2AX.

### Example 22: Induction p21 Expression In Vivo

[0594] mRNA was extracted from total bone marrow samples from mice treated with either 2.4 mg/kg or 10 mg/kg AP-1 at 0, 4, 8, 16, and 24 hours post drug administration. Murine p21 (a downstream mediator of p53 dependent cell cycle arrest), Noxa (an apoptosis marker), and p53 upregulated modulator of apoptosis (PUMA) mRNA expression was then assessed by real time PCR. As can be seen in FIG. 9, results showed an increase in p21, Noxa and PUMA mRNA expression following AP-1 treatment. At the 2.4 mg/kg dose, the increase in p21 expression was greater than the increase in PUMA and Noxa expression, while at the 10 mg/kg dose the increase in p21 expression was greater than the increase in PUMA expression, but not greater than the increase in Noxa expression.

### Example 23: Induction of Cell Cycle Arrest in Bone Marrow In Vivo

[0595] C57BL/6 mice were treated with 10 mg/kg AP-1. Bone marrow from EdU treated animal was collected at defined time points (4, 8, 16 hours) post administration of AP-1, followed by flow cytometric analysis of DNA synthesis in hematopoietic stem and progenitor cells (HSPC). As can be seen in FIG. 10, inhibition of DNA synthesis was observed in HSPCs within 4 hours post administration of AP-1 and reaching a nadir at 8 hours before returning to baseline.

[0596] Additional mice were treated with 5 mg/kg, 10 mg/kg, or 20 mg/kg AP-1. Cell cycle arrest in the bone marrow of mice was then measured by flow cytometry using EdU incorporation in lineage negative, Kit positive, hematopoietic stem and progenitor cells at pre-treatment (0 hours post treatment), and 4 hours, 8 hours, 16 hours, and 24 hours post treatment. As can be seen in FIG. 11, a decrease in the percentage of EdU+ cells from 0-8 hours post treatment was observed. The decrease reversed from 8-24 hours post treatment. These results indicate that AP-1 reversibly induced cell cycle arrest in mouse bone marrow cells in vivo.

### Example 24: MIC-1 Levels Following AP-1 Treatment

[0597] FIG. 12 shows the levels of MIC-1, a clinical biomarker of p53 activation, in the serum of mice before (time 0) or after treatment with AP-1 at a dose of 2.4 mg/kg or 10 mg/kg. Results show that murine MIC-1 levels, as measured by ELISA, peak between 4 and 8 hours post treatment with AP-1, correlating with cell cycle inhibition in vivo, as shown by FIG. 11.

### Example 25: Induction of Cell Cycle Arrest in MCF-Tumors

[0598] Mice bearing MCF-7 tumors were administered a single 20 mg/kg dose of AP-1 intravenously. Tumor samples were collected 16 hours post dose and stained for p⁵³, p²¹, PARP, and bromodeoxyuridine (BrdU), which is indicative of cell proliferation. As can be seen in FIG. 13, AP-1 treatment increased p53 and p21 expression while also causing cell cycle arrest as indicated by a decrease in BrdU staining. Furthermore, an increase in PARP staining was seen with AP-1 treatment. Quantification of p53, p21, PARP, and BrdU staining at 16, 24, and 48 hours post dose is shown in FIG. 14.

### Example 26: Combination Treatment of a MCF-7.1 Mouse Model with AP-1 and Abraxane®

[0599] Female athymic nude mice bearing established, subcutaneous MCF-7.1 tumors were treated intravenously with 5 mg/kg AP-1, 15 mg/kg Abraxane®, 5 mg/kg AP-1 and 15 mg/kg Abraxane®, or vehicle control. Abraxane® was dosed once weekly (qwk), while vehicle and AP-1 was dosed twice weekly. In the combination treatment group, AP-1 was administered 24 hours prior to administration of Abraxane®. As can be seen in FIG. 15, the MCF-7.1 tumor volume decreased with Abraxane® or Abraxane® AP-1 combination treatment.

### Example 27: Protection Against Topotecan-Induced Neutrophil Depletion

[0600] Female C57BL/6 mice were treated with 1.5 mg/kg topotecan on days 1-5 of a treatment period. Twenty-four hours prior to first topotecan dose, mice were treated with 2.4 mg/kg AP-1 or vehicle control (n=5 mice per group). Mice were then treated with 2.4 mg/kg AP-1 or vehicle control 30 minutes before each subsequent dose of topotecan. As can be seen in FIG. 16A, mice that were pretreated with AP-1 had a higher neutrophil count compared to mice pretreated with vehicle controls. Similar results were achieved when the experiment was repeated with n=7 mice per group as shown in FIG. 16B. The result indicates a protective effect of AP-1 against topotecan induced neutrophil depletion.

[0601] In some embodiments, a preclinical or clinical conclusion can be drawn based upon analysis neutrophil levels of two treatment groups. For example, a preclinical conclusion can be based upon analysis of neutrophil levels in Group A and Group B as illustrated in FIG. 16C or FIG. 16D, where Group A consists of mice treated with 1.5 mg/kg topotecan on days 1-5 of a treatment period, and Group B consists of mice treated with topotecan on days 1-5 of a treatment period and AP-1 24 hours before the first topotecan dose and 30 minutes before each subsequent topotecan dose.

### Example 28: Effect of AP-1 on Anti-Tumor Activity of Topotecan in p53-Mutant Mouse Cancer Models

[0602] C57BL/6 mice bearing established syngeneic MC38 colon cancer tumors, or nu/nu mice bearing established H69 or H211 xenograft tumors were treated with topotecan on days 1-5 and either AP-1 or vehicle on days 0-4. Median tumor volume and mouse survival was assessed. As can be seen in FIG. 17A, FIG. 17B, and FIG. 17C, topotecan treatment led to decreased tumor volumes and increased survival. The anti-tumor activity of topotecan was not diminished by pretreatment with AP-1. In the MC38 and H69 models, pretreatment with AP-1 yielded a modest enhancement of mouse survival.

### Example 29: Protection Against Carboplatin/Paclitaxel-Induced Neutrophil Depletion

[0603] Mice were divided into six treatment groups and administered vehicle control, AP-1 alone, a combination of carboplatin and paclitaxel, or a combination of AP-1, carboplatin, and paclitaxel. The administration time(s) of AP-1 in relation to carboplatin and paclitaxel varied, with the time of carboplatin/paclitaxel administration being denoted as time 0 hours. Positive times (e.g. time+8 hours) indicate AP-1 treatments that occurred after treatment with carboplatin/paclitaxel and negative times (e.g., −1 hour) indicate AP-1 treatment before carboplatin/paclitaxel administration. AP-1 and paclitaxel were administered intravenously while carboplatin was administered via intraperitoneal injection.

[0604] Group 1 was treated with a vehicle control. Group 2 was treated with AP-1 (2.4 mg/kg) at times −8 hours, −1 hour and +8 hours (AP-1 @ −8 hr, −1 hr, +8 hr). Group 3 was treated with carboplatin (25 mg/kg) and paclitaxel (5 mg/kg) at time 0 hour (C+P). Group 4 was treated with AP-1 at times −24 hours and −1 hour and carboplatin (25 mg/kg) and paclitaxel (5 mg/kg) at time 0 hour (C+P+AP-1 @ −24 hr,−1 hr). Group 5 was treated with AP-1 at times −8 hours, −1 hours and +8 hours and carboplatin (25 mg/kg) and paclitaxel (5 mg/kg) at time 0 hour (C+P+AP-1 @ −8 hr,−1 hr, +8 hr). Group 6 was treated with AP-1 at times −8 hours and −1 hour and carboplatin (25 mg/kg) and paclitaxel (5 mg/kg) at time 0 hour (C+P+AP-1 @ −8 hr,−1 hr). Following treatment, blood was collected from mice and neutrophil levels in blood were determined. Results of neutrophil levels in mice from each treatment group 4 days after carboplatin and paclitaxel treatment are shown in FIG. 18A.

[0605] In some embodiments, a preclinical or clinical conclusion can be drawn based upon analysis of neutrophil levels in two treatment groups. For example, a preclinical conclusion can be based upon analysis of neutrophil levels in Group A and Group B as illustrated in FIG. 18B, where group A consists of mice treated with carboplatin (25 mg/kg) and paclitaxel (5 mg/kg) at time 0 hour, and Group B consists of mice treated with AP-1 at times −8 hours, −1 hours and +8 hours and carboplatin (25 mg/kg) and paclitaxel (5 mg/kg) at time 0 hour.

### Example 30: Effect of a Peptidomimetic Macrocycle on Docetaxel-Induced Neutrophil Depletion

[0606] Mice were divided into four treatment groups and administered vehicle control, AP-1 alone, docetaxel, or a combination of AP-1, and docetaxel. The administration time(s) of AP-1 in relation to docetaxel varied, with the time of docetaxel administration being denoted as time 0 hours. Positive times (e.g. time+8 hours) indicate AP-1 treatments that occurred after treatment with docetaxel and negative times (e.g., −1 hour) indicate AP-1 treatment before docetaxel administration. AP-1 and docetaxel were administered intravenously.

[0607] Group 1 was treated with a vehicle control. Group 2 was treated with AP-1 (2.4 mg/kg) at times −8 hours, −1 hour and +8 hours (AP-1 @ −8 hr,−1 hr, +8 hr). Group 3 was treated with docetaxel (10 mg/kg) at time 0 hour. Group 4 was treated with AP-1 at times −8 hours, −1 hour, and +8 hours and docetaxel (10 mg/kg) at time 0 hour (Docetaxel AP-1 @-h8r,−1 hr, +8 hr). Following treatment, blood was collected from mice and neutrophil levels in blood were determined. Results of neutrophil levels in mice from each treatment group 4 days after docetaxel treatment are shown in FIG. 19.

### Example 31: A Phase 1b/2 Trial of AP-1 for the Prevention of Chemotherapy-Induced Myelosuppression

### Phase 1b Study Objectives.

[0608] The primary objectives of the trial are:
[0609] To evaluate the safety and tolerability and determine the recommended Phase 2 dose (RP2D) of AP-1 when administered to patients with TP53-mutated extensive disease (ED) small cell lung cancer (SCLC) receiving topotecan as 2nd-line treatment.

[0610] The secondary objectives of the trial are:
[0611] To evaluate the preliminary myelopreservation effects of AP-1 when administered to patients with TP53-mutated ED SCLC undergoing 2nd-line treatment with topotecan.
[0612] To evaluate the efficacy of topotecan when administered as 2nd-line treatment for patients with TP53-mutated ED SCLC who are receiving supportive treatment with AP-1.
[0613] To evaluate the pharmacokinetic (PK) profile of AP-1 when administered with topotecan

[0614] An exploratory objective of the study is to assess pharmacodynamic (PD) biomarkers in blood and assess correlation with clinical response.

### Phase 1b Study Endpoints:

[0615] The primary phase 1b study endpoints include the proportion of patients with National Cancer Institute (NCI) Common Terminology Criteria for Adverse Events (CTCAE) Grade 3/4 treatment emergent adverse events (TEAEs). Secondary endpoints include:
[0616] The proportion of planned treatment cycles delayed due to toxicity.
[0617] Overall response rate (ORR) by Response Evaluation Criteria in Solid Tumors (RECIST) 1.1.
[0618] Progression free survival (PFS).
[0619] Overall survival (OS).
[0620] PK parameters (e.g., area-under-the-curve [AUC], maximum concentration [Cₘₐₓ], time of Cₘₐₓ [tₘₐₓ], half-life [t_{1/2}]) of AP-1.

[0621] Exploratory endpoints include:
[0622] Dose response curves of macrophage inhibitory cytokine-1 (MIC-1) levels in blood vs. myelopreservation parameters.
[0623] p21 RNA levels and other downstream indicators of p53-induced cellular arrest in peripheral blood mononuclear cells (PBMC).

### Phase 2 Study Objectives.

[0624] The primary phase 2 study objective is to evaluate the myelopreservation effects of AP-1 when administered at the RP2D to patients with TP53-mutated ED SCLC undergoing 2nd line treatment with topotecan.

[0625] Secondary phase 2 study objectives are to
[0626] To further evaluate the safety and tolerability of AP-1 as supportive care during treatment with topotecan.
[0627] To further evaluate the efficacy of topotecan when administered as 2nd-line treatment for patients with TP53-mutated ED SCLC who are receiving supportive treatment with AP-1.
[0628] To further evaluate the PK profile of AP-1 when administered with topotecan.

[0629] An exploratory phase 2 study objective is to assess PD biomarkers and assess correlation of PD biomarkers with clinical response.

### Phase 2 Study Endpoints.

[0630] The primary endpoint of the phase 2 study is the proportion of patients with Grade ≥3 neutropenia in Cycle 1. The secondary endpoints of the Phase 2 study are:
[0631] The proportion of patients with NCI CTCAE Grade 3/4 TEAEs
[0632] The proportion of planned treatment cycles delayed due to toxicity
[0633] ORR
[0634] PFS
[0635] OS
[0636] PK parameters (e.g., AUC, Cₘₐₓ, tₘₐₓ, t_{1/2}) of AP-1

[0637] Exploratory endpoints of the phase 2 study are:
[0638] Dose response curves of MIC-1 levels in blood vs. myelopreservation parameters.
[0639] p²¹ RNA levels and other downstream indicators of p53-induced cellular arrest in PBMCs.

### Study Design/Description:

[0640] Small Cell Lung Cancer:

[0641] During the Phase 1b dose optimization stage of the study, AP-1 and topotecan are administered as part of one or more treatment cycles. Treatment cycles are denoted to begin on Day 0 and end on Day 21. Topotecan is administered per standard practice on Days 1-5 of treatment cycles. Patients are randomized to receive 1 of 2 initial AP-1 dose levels, administered on Days 0-4 of each cycle, approximately 24 hours prior to each planned topotecan dose. On days when both drugs are administered (Days 1-4), AP-1 is administered after completion of topotecan infusion. On Days 6, 7, 8, 9, 10, 11, 12, 13, 14, 15, 16, 17, 18, 19, 20, and 21 of treatment cycles, neither topotecan nor AP-1 is administered.

[0642] A schematic of the SCLC Phase 1b dose optimization study design is shown in FIG. 20.

[0643] A Phase 1b schedule optimization and expansion stage is also included, during which AP-1 is administered 6 hours prior to topotecan.

[0644] If pre-determined criteria for safety and myelopreservation activity are met and a RP2D of AP-1 is identified, the randomized Phase 1b expansion and the Phase 2 portion of the study in SCLC patients is triggered.

[0645] In the randomized Phase 1b expansion stage, 20 patients with ED SCLC harboring p53 loss of function mutations requiring 2nd-line treatment with topotecan are randomized 1:1 in a crossover fashion to one of two treatment sequences during Cycles 1 and 2:
[0646] Patients randomized to Sequence A receive treatment with topotecan+AP-1, as outlined above, during Cycle 1; and topotecan alone during Cycle 2. In all subsequent treatment cycles (Cycles ≥3), patients in Sequence A receive treatment with topotecan+AP-1.
[0647] Patients randomized to Sequence B receive treatment with topotecan alone during Cycle 1; and topotecan+AP-1 during Cycle 2. In all subsequent treatment cycles (Cycles ≥3), patients in Sequence B receive treatment with topotecan+AP-1.

[0648] A schematic of the SCLC Phase 1b dose expansion study design is shown in FIG. 21.

[0649] Hematologic toxicities are monitored as described for Phase 1b dose optimization.

[0650] In Phase 2, patients with ED SCLC requiring 2nd line treatment with topotecan are randomized 1:1 to either receive topotecan alone (control arm) or topotecan with supportive AP-1 treatment (experimental arm). Monitoring of hematologic toxicities proceeds as in Phase 1b. A schematic of the SCLC Phase 2 study design is shown in FIG. 22.

### Study Population:

[0651] The SCLC inclusion criteria include:
[0652] 1. Histopathological confirmation of ED SCLC that has recurred or been refractory to one line of treatment with standard platinum-based chemotherapy or immuno-chemotherapy. Patients who received immunotherapy after platinum-based chemotherapy remain eligible.

[0653] SCLC exclusion criteria include:

1. More than one line of prior chemotherapy for ED SCLC

### Treatment Regimens:

[0654] SCLC:

[0655] AP-1 and topotecan are administered as part of treatment cycles. Treatment cycles are denoted to begin on Day 0 and end on Day 21. Topotecan is given as an intravenous (IV) infusion over 30 minutes at a dose of 1.5 mg/m² on Days 1-5 of every treatment cycle. AP-1 is given as an IV infusion over 1 hour on Days 0-4 of every treatment cycle. The first dose of AP-1 (Day 0) is administered approximately 24 hours prior to the first topotecan dose (Day 1). On days when both drugs are administered (Days 1-4), AP-1 is administered after completion of the topotecan infusion. On Days 6, 7, 8, 9, 10, 11, 12, 13, 14, 15, 16, 17, 18, 19, 20, and 21 of treatment cycles, neither topotecan nor AP-1 is administered.

[0656] During Phase 1b dose optimization, patients are randomly assigned to initial AP-1 dose levels. Upon review of preliminary safety and efficacy data, alternative dose levels can also be evaluated. Alternative dose levels are determined based on emerging safety, tolerability, and myelopreservation activity as well as PK/PD data from previous dose levels.

[0657] During Phase 1b dose expansion, patients are randomly assigned to Sequence A or Sequence B. All patients in both treatment arms receive topotecan at a dose of 1.5 mg/m² on Days 1-5 of each treatment cycle. Patients randomized to Sequence A receive AP-1 as an IV infusion over 1 hour at the RP2D on Days 0-4 of Cycle 1, topotecan alone during Cycle 2, and AP-1+topotecan for all Cycles ≥3. Patients randomized to Sequence B receive topotecan alone during Cycle 1, AP-1 as an IV infusion over 1 hour at the RP2D on Days 0-4 of Cycle 2 and all subsequent cycles (Cycles ≥3). Neither topotecan nor AP-1 is administered on days 6-21 of treatment cycles.

[0658] During Phase 2, patients randomly assigned to the experimental arm receive AP-1 as an IV infusion over 1 hour at the RP2D on Days 0-4 of every cycle and topotecan at a dose of 1.5 mg/m² on Days 1-5 of each cycle. Neither topotecan nor AP-1 is administered on days 6-21 of treatment cycles. Patients randomly assigned to the control arm receive topotecan per the same dose and schedule but do not receive any administrations of AP-1.

### Myelopreservation Activity Assessments:

[0659] In both Phase 1b and Phase 2, the hematologic effects of treatment for individual patients are based on local laboratory results.

### Safety Assessments:

[0660] Other safety assessments include evaluation of adverse events (AEs) using NCI CTCAE (Version 5.0), clinical laboratory assessments (chemistry, hematology), vital sign measurements (blood pressure, heart rate, respiratory rate and body temperature), 12-lead electrocardiogram (ECG) measurements, and physical examination.

[0661] SCLC:

[0662] At each dose level in the Phase 1b dose optimization stage, 6 patients are first enrolled and evaluated, before additional patients are enrolled at that dose level to complete the cohort. Safety information from a lower dose level can be used to make a determination about further enrollment at a higher dose level, if safety or tolerability concerns arise. Alternative dose levels can be explored.

### PK/PD Assessments:

[0663] Blood samples for PK assessments of AP-1 are collected during Cycle 1 for patients enrolled in Phase 1b dose optimization and dose expansion (except for patients randomized to Sequence B of the SCLC cohort) and for patients randomized to the experimental arm in Phase 2. For patients randomized to Sequence B of the SCLC expansion cohort, blood samples for PK assessments of AP-1 are collected during Cycle 2.

### Evaluation of Tumor Response:

[0664] To assess for potential impact of AP-1 on the efficacy of topotecan and docetaxel, patients have radiographic response to treatment assessed after every 2 cycles. Response is based on investigator assessment according to RECIST (1.1).

### Treatment Duration:

[0665] Patients continue to receive topotecan or topotecan plus supportive AP-1 (SCLC) until unacceptable toxicity, disease progression, death, or withdrawal of consent, whichever occurs first.

### Example 32: Chemoprotection for Topotecan-Induce Mucositis

[0666] C57BL/6 mice (n=10 per group) were divided into four treatment groups. Group 1 was treated with a vehicle control. Group 2 was treated with 2.4 mg/kg AP-1 on days 0, 1, 2, 3, and 4 (0-4). Group 3 was treated with 1.5 mg/kg topotecan on days 1, 2, 3, 4, and 5 (1-5). Group 4 was treated with 2.4 mg/kg AP-1 on days 0-4 and 1.5 mg/kg topotecan on days 1-5. On days where topotecan and AP-1 were co-administered, AP-1 was given 30 minutes prior to topotecan. Gut samples were taken from mice at days 7 and 9 post treatment to assess hypertrophy and hyperplasia. Histopathology analysis of gut samples from mice treated with single agent topotecan showed marked epithelium hypertrophy/hyperplasia, moderate expansion of lamina propria (black arrow of FIG. 23) and moderate to severe crypt loss (white arrow of top panel FIG. 23). Gut tissue of animals treated with AP-1 prior to topotecan showed less extensive hypertrophy/hyperplasia; and mild crypt loss (white arrow of bottom panel of FIG. 23). Images and gut tissues and quantification of pathology scores can be seen in FIG. 24A.

[0667] In some embodiments, a preclinical or clinical conclusion can be drawn based upon analysis of quantified pathology scores in two treatment groups. For example, a preclinical conclusion can be based upon analysis of quantified pathology scores in Group A and Group B as illustrated in FIG. 24B, where Group A consists of mice treated with 1.5 mg/kg topotecan on days 1-5 of a treatment period, and Group B consists of mice treated with topotecan on days 1-5 of a treatment period and AP-1 24 hours before the first topotecan dose and 30 minutes before each subsequent topotecan dose.

### EMBODIMENTS

[0668] The following non-limiting embodiments provide illustrative examples of methods disclosed herein, but do not limit the scope of the disclosure.

### Embodiment 1

[0669] A method of treating a tumor in a subject in need thereof, the method comprising administering to the subject a therapeutically effective amount of a peptidomimetic macrocycle and a therapeutically effective amount of a first additional pharmaceutically-active agent, wherein:
[0670] the administration of the peptidomimetic macrocycle induces cell cycle arrest in a non-cancerous tissue in the subject;
[0671] the administration of the peptidomimetic macrocycle does not induce cell cycle arrest in the tumor; and
[0672] the administration of the peptidomimetic macrocycle does not induce apoptosis in the tumor.

### Embodiment 2

[0673] The method of embodiment 1, wherein the non-cancerous tissue is bone marrow.

### Embodiment 3

[0674] The method of embodiment 1, wherein the non-cancerous tissue is digestive tract tissue.

### Embodiment 4

[0675] The method of any one of embodiments 1-3, wherein the tumor has a p53 deactivating mutation.

### Embodiment 5

[0676] The method of embodiment 4, further comprising detecting the p53 deactivating mutation.

### Embodiment 6

[0677] The method of any one of embodiments 1-5, wherein the non-cancerous tissue comprises a functional p53 protein.

### Embodiment 7

[0678] The method of embodiment 6, further comprising confirming a presence of the functional p53 protein.

### Embodiment 8

[0679] The method of any one of embodiments 1-7, wherein administration of the peptidomimetic macrocycle reduces a likelihood of the subject developing a side effect associated with administration of the first additional pharmaceutically-active agent.

### Embodiment 9

[0680] The method of any one of embodiments 1-8, wherein administration of the peptidomimetic macrocycle reduces a level of a side effect in the subject, wherein the side effect is associated with administration of the first additional pharmaceutically-active agent.

### Embodiment 10

[0681] The method of embodiment 8, wherein the side effect is associated with myelosuppression.

### Embodiment 11

[0682] The method of embodiment 8, wherein the side effect is associated with digestive tissue.

### Embodiment 12

[0683] The method of embodiment 8, wherein the side effect is neutropenia.

### Embodiment 13

[0684] The method of embodiment 8, wherein the side effect is thrombocytopenia.

### Embodiment 14

[0685] The method of embodiment 8, wherein the side effect is mucositis.

### Embodiment 15

[0686] The method of embodiment 9, wherein the side effect is associated with myelosuppression.

### Embodiment 16

[0687] The method of embodiment 9, wherein the side effect is associated with digestive tissue.

### Embodiment 17

[0688] The method of embodiment 9, wherein the side effect is neutropenia.

### Embodiment 18

[0689] The method of embodiment 9, wherein the side effect is thrombocytopenia.

### Embodiment 19

[0690] The method of embodiment 9, wherein the side effect is mucositis.

### Embodiment 20

[0691] The method of embodiment 9, wherein administration of the peptidomimetic macrocycle increases a maximum tolerated dose of the first additional pharmaceutically-active agent.

### Embodiment 21

[0692] The method of any one of embodiments 1-20, wherein the first additional pharmaceutically-active agent is a topoisomerase inhibitor.

### Embodiment 22

[0693] The method of embodiment 21, wherein the topoisomerase inhibitor is a class I topoisomerase inhibitor.

### Embodiment 23

[0694] The method of embodiment 21, wherein the topoisomerase inhibitor is a class II topoisomerase inhibitor.

### Embodiment 24

[0695] The method of embodiment 21, wherein the topoisomerase inhibitor is topotecan.

### Embodiment 25

[0696] The method of embodiment 21, wherein the topoisomerase inhibitor is rubitecan.

### Embodiment 26

[0697] The method of embodiment 21, wherein the topoisomerase inhibitor is belotecan.

### Embodiment 27

[0698] The method of embodiment 21, wherein the topoisomerase inhibitor is etoposide.

### Embodiment 28

[0699] The method of embodiment 21, wherein the topoisomerase inhibitor is teniposide.

### Embodiment 29

[0700] The method of embodiment 21, wherein the therapeutically effective amount of the first additional pharmaceutically active agent is about 1.5 mg/m².

### Embodiment 30

[0701] The method of any one of embodiments 1-20, wherein the first additional pharmaceutically-active agent is a microtubule disassembly blocker.

### Embodiment 31

[0702] The method of embodiment 30, wherein the microtubule disassembly blocker is docetaxel.

### Embodiment 32

[0703] The method of embodiment 30, wherein the therapeutically effective amount of the first additional pharmaceutically active agent is about 75 mg/m².

### Embodiment 33

[0704] The method of any one of embodiments 1-20, wherein the first additional pharmaceutically-active agent is an alkylating-like agent.

### Embodiment 34

[0705] The method of embodiment 33, wherein the alkylating-like agent is carboplatin.

### Embodiment 35

[0706] The method of any one of embodiments 1-20, wherein the first additional pharmaceutically-active agent is a taxane.

### Embodiment 36

[0707] The method of embodiment 35, wherein the taxane is paclitaxel.

### Embodiment 37

[0708] The method of any one of embodiments 1-36, further comprising administering a therapeutically-effective amount of a second additional pharmaceutically-active agent.

### Embodiment 38

[0709] The method of embodiment 37, wherein the first additional pharmaceutically-active agent is a taxane and the second additional pharmaceutically-active agent is an alkylating-like agent.

### Embodiment 39

[0710] The method of embodiment 38, wherein the taxane is paclitaxel.

### Embodiment 40

[0711] The method of embodiment 38 or 39, wherein the alkylating-like agent is carboplatin.

### Embodiment 41

[0712] The method of embodiment 37, wherein the first additional pharmaceutically-active agent and the second additional pharmaceutically-active agent are administered concurrently.

### Embodiment 42

[0713] The method of embodiment 37, wherein the first additional pharmaceutically-active agent and the second additional pharmaceutically-active agent are administered sequentially.

### Embodiment 43

[0714] The method of any one of embodiments 1-42, wherein the peptidomimetic macrocycle and the first additional pharmaceutically-active agent are administered concurrently.

### Embodiment 44

[0715] The method of any one of embodiments 1-42, wherein the peptidomimetic macrocycle and the first additional pharmaceutically-active agent are administered sequentially.

### Embodiment 45

[0716] The method of any one of embodiments 1-42 or 44, wherein the peptidomimetic macrocycle is administered about 12 hours to about 36 hours before administration of the first additional pharmaceutically-active agent.

### Embodiment 46

[0717] The method of embodiment 45, wherein the peptidomimetic macrocycle is administered about 24 hours before administration of the first additional pharmaceutically-active agent.

### Embodiment 47

[0718] The method of any one of embodiments 1-46, wherein:
[0719] the peptidomimetic macrocycle is administered on days 1, 2, 3, 4, and 5 of a 6-day period;
[0720] the peptidomimetic macrocycle is not administered on day 6 of the 6-day period;
[0721] the first additional pharmaceutically-active agent is administered on days 2, 3, 4, 5, and 6 of the 6-day period; and
[0722] the first additional pharmaceutically-active agent is not administered on day 1 of the 6-day period.

### Embodiment 48

[0723] The method of embodiment 47, wherein each administration of the peptidomimetic macrocycle occurs about 12 hours to about 36 hours before each administration of the first additional pharmaceutically-active agent.

### Embodiment 49

[0724] The method of any one of embodiments 1-46, wherein:
[0725] the peptidomimetic macrocycle is administered on days 1, 2, and 3 of a 3-day period;
[0726] the first additional pharmaceutically-active agent is administered on day 2 of the 3-day period; and
[0727] the first additional pharmaceutically-active agent is not administered on day 1 or day 3 of the 3-day period.

### Embodiment 50

[0728] The method of any one of embodiments 1-49, wherein the peptidomimetic macrocycle binds to MDM2.

### Embodiment 51

[0729] The method of any one of embodiments 1-50, wherein the peptidomimetic macrocycle binds to MDMX.

### Embodiment 52

[0730] The method of any one of embodiments 1-49, wherein the peptidomimetic macrocycle binds to MDM2 and MDMX.

### Embodiment 53

[0731] The method of any one of embodiments 1-52, wherein the peptidomimetic macrocycle induces p53-dependent cell cycle arrest in the non-cancerous tissue.

### Embodiment 54

[0732] The method of any one of embodiments 1-53, wherein the therapeutically-effective amount of the peptidomimetic macrocycle is less than an amount of the peptidomimetic macrocycle that is needed to induce apoptosis in the non-cancerous tissue of the subject.

### Embodiment 55

[0733] The method of any one of embodiments 1-54, wherein the peptidomimetic macrocycle is of the formula:

[chemical structure]

or a pharmaceutically acceptable salt thereof, wherein:
[0734] each A, C, D, and E is independently an amino acid;
[0735] each B is independently an amino acid,

[chemical structure]

[—NH-L₃-CO—], [—NH-L₃-SO₂—], or [—NH-L₃-];
[0736] each R₁ and R₂ is independently hydrogen, alkyl, alkenyl, alkynyl, arylalkyl, cycloalkyl, cycloalkylalkyl, heteroalkyl, or heterocycloalkyl, unsubstituted or substituted with halo-; or forms a macrocycle-forming linker L′ connected to the alpha position of one of said D or E amino acids;
[0737] each R₃ is independently hydrogen, alkyl, alkenyl, alkynyl, arylalkyl, heteroalkyl, cycloalkyl, heterocycloalkyl, cycloalkylalkyl, aryl, or heteroaryl, optionally substituted with R₅;
[0738] each L and L′ is independently a macrocycle-forming linker of the formula -L₁-L₂-;
[0739] each L₁, L₂, and L₃ is independently alkylene, alkenylene, alkynylene, heteroalkylene, cycloalkylene, heterocycloalkylene, arylene, heteroarylene, or [—R₄—K—R₄-]ₙ, each being optionally substituted with R₅;
[0740] each R₄ is independently alkylene, alkenylene, alkynylene, heteroalkylene, cycloalkylene, heterocycloalkylene, arylene, or heteroarylene;
[0741] each K is independently O, S, SO, SO₂, CO, CO₂, or CONR₃;
[0742] each R₅ is independently halogen, alkyl, —OR₆, —N(R₆)₂, —SR₆, —SOR₆, —SO₂R₆, —CO₂R₆, a fluorescent moiety, a radioisotope or a therapeutic agent;
[0743] each R₆ is independently hydrogen, alkyl, alkenyl, alkynyl, arylalkyl, cycloalkylalkyl, heterocycloalkyl, a fluorescent moiety, a radioisotope or a therapeutic agent;
[0744] each R₇ is independently hydrogen, alkyl, alkenyl, alkynyl, arylalkyl, cycloalkyl, heteroalkyl, cycloalkylalkyl, heterocycloalkyl, aryl, or heteroaryl, optionally substituted with R₅, or part of a cyclic structure with a D residue;
[0745] each R₈ is independently hydrogen, alkyl, alkenyl, alkynyl, arylalkyl, cycloalkyl, heteroalkyl, cycloalkylalkyl, heterocycloalkyl, aryl, or heteroaryl, optionally substituted with R₅, or part of a cyclic structure with an E residue;
[0746] each v is independently an integer from 1-1000;
[0747] each w is independently an integer from 1-1000;
[0748] u is 1, 2, 3, 4, 5, 6, 7, 8, 9, or 10;
[0749] each x, y and z is independently 1, 2, 3, 4, 5, 6, 7, 8, 9, or 10; and
[0750] each n is independently 1, 2, 3, 4, or 5.

### Embodiment 56

[0751] The method of embodiment 55, wherein v is 3-10.

### Embodiment 57

[0752] The method of embodiment 55, wherein v is 3.

### Embodiment 58

[0753] The method of any one of embodiments 55-57, wherein w is 3-10.

### Embodiment 59

[0754] The method of any one of embodiments 55-57, wherein w is 6.

### Embodiment 60

[0755] The method of any one of embodiments 55-59, wherein x+y+z=6.

### Embodiment 61

[0756] The method of any one of embodiments 55-60, wherein each L₁ and L₂ is independently alkylene, alkenylene, alkynylene, heteroalkylene, cycloalkylene, heterocycloalkylene, arylene, or heteroarylene.

### Embodiment 62

[0757] The method of any one of embodiments 55-60, wherein each L₁ and L₂ is independently alkylene or alkenylene.

### Embodiment 63

[0758] The method of any one of embodiments 55-62, wherein each R₁ and R₂ is independently hydrogen, alkyl, alkenyl, alkynyl, arylalkyl, cycloalkyl, cycloalkylalkyl, heteroalkyl, or heterocycloalkyl, unsubstituted or substituted with halo-.

### Embodiment 64

[0759] The method of any one of embodiments 55-62, wherein each R₁ and R₂ is independently hydrogen.

### Embodiment 65

[0760] The method of any one of embodiments 55-62, wherein each R₁ and R₂ is independently alkyl.

### Embodiment 66

[0761] The method of any one of embodiments 55-62, wherein each R₁ and R₂ is independently methyl.

### Embodiment 67

[0762] The method of any one of embodiments 55-65, wherein u is 1.

### Embodiment 68

[0763] The method of any one of embodiments 55-67, wherein each E is Ser or Ala, or d-Ala.

### Embodiment 69

[0764] The method of any one of embodiments 1-68, wherein the peptidomimetic macrocycle comprises an amino acid sequence that is at least 60% identical to an amino acid sequence listed Table 1, Table 1a, Table 1b, Table 1c, Table 2a, Table 2b, Table 3, or Table 3a.

### Embodiment 70

[0765] The method any one of embodiments 1-68, wherein the peptidomimetic macrocycle comprises an amino acid sequence that is at least 80% identical to an amino acid sequence listed in Table 1, Table 1a, Table 1b, Table 1c, Table 2a, Table 2b, Table 3, or Table 3a.

### Embodiment 71

[0766] The method of any one of embodiments 1-70, wherein the subject is a human.

### Embodiment 72

[0767] The method of any one of embodiments 1-71, wherein when, in a controlled study, 2.4 mg/kg of the peptidomimetic macrocycle is administered to a group of mice, changes in:

[0768] (i) an average p21 mRNA expression;

[0769] (ii) an average p53 upregulated modulator of apoptosis (PUMA) mRNA expression; and

[0770] (iii) an average Noxa mRNA expression;

[0771] in bone marrow of the group of mice occur with at most a 30% deviation from corresponding lines illustrated in FIG. 9.

### Embodiment 73

[0772] The method of any one of embodiments 1-71, wherein when, in a controlled study, 5 mg/kg of the peptidomimetic macrocycle is administered to a first group of 5-ethynyl-2′-deoxyuridine (EdU) treated mice, 10 mg/kg of the peptidomimetic macrocycle is administered to a second group of 5-ethynyl-2′-deoxyuridine (EdU) treated mice, and 20 mg/kg of the peptidomimetic macrocycle is administered to a third group of 5-ethynyl-2′-deoxyuridine (EdU) treated mice, a change in a percentage of lineage negative, Kit positive, hematopoietic stem and progenitor cells (HSPCs) that are EdU+ in the first group, the second group, and the third group occurs with at most a 30% deviation from corresponding lines illustrated in FIG. 11.

### Embodiment 74

[0773] The method of any one of embodiments 1-71, wherein:
[0774] the peptidomimetic macrocycle is administered on days 1, 2, 3, 4, and 5 of a 6-day period;
[0775] the peptidomimetic macrocycle is not administered on day 6 of the 6-day period;
[0776] the first additional pharmaceutically-active agent is administered on days 2, 3, 4, 5, and 6 of the 6-day period;
[0777] the first additional pharmaceutically-active agent is not administered on day 1 of the 6-day period; and
[0778] when, in a controlled study:
   [0779] (i) Group A consists of mice treated with 1.5 mg/kg of topotecan on days 2, 3, 4, 5, and 6 of a 6-day study treatment period; and not treated with topotecan on day 1 of the 6-day study treatment period; and
   [0780] (ii) Group B consists of mice treated with 2.4 mg/kg of the peptidomimetic macrocycle on days 1, 2, 3, 4, and 5 of the 6-day study treatment period and 1.5 mg/kg of topotecan on days 2, 3, 4, 5, and 6 of the 6-day study treatment period, wherein the mice of Group B are not treated with the peptidomimetic macrocycle on day 6 of the 6-day study treatment period and are not treated with topotecan on day 1 of the 6-day study treatment period;

[0781] a number of neutrophils present per μL of blood in mice of Group B is increased compared to a number of neutrophils present per μL of blood in mice of Group A as illustrated in FIG. 16D.

### Embodiment 75

[0782] The method of any one of embodiments 1-71, wherein:
[0783] the peptidomimetic macrocycle is administered on days 1, 2, 3, 4, and 5 of a 6-day period;
[0784] the peptidomimetic macrocycle is not administered on day 6 of the 6-day period;
[0785] the first additional pharmaceutically-active agent is administered on days 2, 3, 4, 5, and 6 of the 6-day period;
[0786] the first additional pharmaceutically-active agent is not administered on day 1 of the 6-day period; and
[0787] when, in a controlled study:
   [0788] (i) Group A consists of mice treated with 1.5 mg/kg of topotecan on days 2, 3, 4, 5, and 6 of a 6-day study treatment period; and not treated with topotecan on day 1 of the 6-day study treatment period; and
   [0789] (ii) Group B consists of mice treated with 2.4 mg/kg of the peptidomimetic macrocycle on days 1, 2, 3, 4, and 5 of the 6-day study treatment period and 1.5 mg/kg of topotecan on days 2, 3, 4, 5, and 6 of the 6-day study treatment period, wherein the mice of Group B are not treated with the peptidomimetic macrocycle on day 6 of the 6-day study treatment period and are not treated with topotecan on day 1 of the 6-day study treatment period;

[0790] a number of neutrophils present per μL of blood in mice of Group B is increased compared to a number of neutrophils present per μL of blood in mice of Group A as illustrated in FIG. 16C.

### Embodiment 76

[0791] The method of any one of embodiments 1-71, wherein:
[0792] the peptidomimetic macrocycle is administered on days 1, 2, 3, 4, and 5 of a 6-day period;
[0793] the peptidomimetic macrocycle is not administered on day 6 of the 6-day period;
[0794] the first additional pharmaceutically-active agent is administered on days 2, 3, 4, 5, and 6 of the 6-day period;
[0795] the first additional pharmaceutically-active agent is not administered on day 1 of the 6-day period; and
[0796] when, in a controlled study:
   [0797] (i) Group A consists of mice treated with 1.5 mg/kg of topotecan on days 2, 3, 4, 5, and 6 of a 6-day study treatment period; and not treated with topotecan on day 1 of the 6-day study treatment period; and
   [0798] (ii) Group B consists of mice treated with 2.4 mg/kg of the peptidomimetic macrocycle on days 1, 2, 3, 4, and 5 of the 6-day study treatment period and 1.5 mg/kg of topotecan on days 2, 3, 4, 5, and 6 of the 6-day study treatment period, wherein the mice of Group B are not treated with the peptidomimetic macrocycle on day 6 of the 6-day study treatment period and are not treated with topotecan on day 1 of the 6-day study treatment period;

[0799] a measure of hypertrophy/hyperplasia in digestive tract tissue in mice of Group B is modified compared to a measure of hypertrophy/hyperplasia in digestive tract tissue in mice of Group A as illustrated in FIG. 24B.

### Embodiment 77

[0800] The method of any one of embodiments 1-71, wherein:
[0801] the peptidomimetic macrocycle is administered on days 1, 2, 3, 4, and 5 of a 6-day period;
[0802] the peptidomimetic macrocycle is not administered on day 6 of the 6-day period;
[0803] the first additional pharmaceutically-active agent is administered on days 2, 3, 4, 5, and 6 of the 6-day period;
[0804] the first additional pharmaceutically-active agent is not administered on day 1 of the 6-day period; and
[0805] when, in a controlled study:
   [0806] (i) Group A consists of mice treated with 1.5 mg/kg of topotecan on days 2, 3, 4, 5, and 6 of a 6-day study treatment period; and not treated with topotecan on day 1 of the 6-day study treatment period; and
   [0807] (ii) Group B consists of mice treated with 2.4 mg/kg of the peptidomimetic macrocycle on days 1, 2, 3, 4, and 5 of the 6-day study treatment period and 1.5 mg/kg of topotecan on days 2, 3, 4, 5, and 6 of the 6-day study treatment period, wherein the mice of Group B are not treated with the peptidomimetic macrocycle on day 6 of the 6-day study treatment period and are not treated with topotecan on day 1 of the 6-day study treatment period;

[0808] digestive tract tissue samples from about 80% of mice of Group B mice have a hypertrophy/hyperplasia score of 2, and digestive tract tissue samples from about 70% of mice of Group A have a hypertrophy/hyperplasia score of 3.

### Embodiment 78

[0809] The method of embodiment 37, wherein:
[0810] a first administration of the peptidomimetic macrocycle occurs 8 hours prior to the administration of the first additional pharmaceutically-active agent;
[0811] a second administration of the peptidomimetic macrocycle occurs 1 hour prior to the administration of the first additional pharmaceutically-active agent;
[0812] a third administration of the peptidomimetic macrocycle occurs 8 hours after the administration of the first additional pharmaceutically-active agent;
[0813] when, in a controlled study:
   [0814] (i) Group A consists of mice treated with 25 mg/kg carboplatin and 5 mg/kg paclitaxel at a first timepoint;
   [0815] (ii) Group B consists of mice treated with 25 mg/kg carboplatin and 5 mg/kg paclitaxel at the first timepoint and 2.4 mg/kg of the peptidomimetic macrocycle at a second timepoint, a third timepoint, and a fourth timepoint; and
   [0816] (iii) the second timepoint is about 8 hours prior to the first timepoint, the third timepoint is about 1 hour prior to the first timepoint, and the fourth timepoint is about 8 hours after the first timepoint;

[0817] a number of neutrophils present per μL of blood in mice of Group B is increased compared to a number of neutrophils present per μL of blood in mice of Group A as illustrated in FIG. 18B.

### Embodiment 79

[0818] A method of treating a cancer in a subject in need thereof, the method comprising administering to the subject a therapeutically effective amount of a peptidomimetic macrocycle and a therapeutically effective amount of a first additional pharmaceutically-active agent, wherein:
[0819] the cancer has a p53 deactivating mutation;
[0820] a non-cancerous tissue of the subject comprises a functional p53 protein; and
[0821] the non-cancerous tissue is bone marrow or digestive tract tissue.

### Embodiment 80

[0822] The method of embodiment 79, further comprising detecting the p53 deactivating mutation.

### Embodiment 81

[0823] The method of embodiment 79 or 80, wherein the non-cancerous tissue is bone marrow.

### Embodiment 82

[0824] The method of embodiment 79 or 80, wherein the non-cancerous tissue is digestive tract tissue.

### Embodiment 83

[0825] The method of any one of embodiments 79-82, wherein administration of the peptidomimetic macrocycle induces cell-cycle arrest in the non-cancerous tissue.

### Embodiment 84

[0826] The method of any one of embodiments 79-83 wherein administration of the peptidomimetic macrocycle does not induce cell cycle arrest or apoptosis in the cancer.

### Embodiment 85

[0827] The method of any one of embodiments 79-84, wherein administration of the peptidomimetic macrocycle reduces a likelihood of the subject developing a side effect associated with administration of the first additional pharmaceutically-active agent.

### Embodiment 86

[0828] The method of any one of embodiments 79-85, wherein administration of the peptidomimetic macrocycle reduces a level of a side effect in the subject, wherein the side effect is associated with administration of the first additional pharmaceutically-active agent.

### Embodiment 87

[0829] The method of embodiment 85, wherein the side effect is associated with myelosuppression.

### Embodiment 88

[0830] The method of embodiment 85, wherein the side effect is associated with digestive tissue.

### Embodiment 89

[0831] The method of embodiment 85, wherein the side effect is neutropenia.

### Embodiment 90

[0832] The method of embodiment 85, wherein the side effect is thrombocytopenia.

### Embodiment 91

[0833] The method of embodiment 85, wherein the side effect is mucositis.

### Embodiment 92

[0834] The method of embodiment 86, wherein the side effect is associated with myelosuppression.

### Embodiment 93

[0835] The method of embodiment 86, wherein the side effect is associated with digestive tissue.

### Embodiment 94

[0836] The method of embodiment 86, wherein the side effect is neutropenia.

### Embodiment 95

[0837] The method of embodiment 86, wherein the side effect is thrombocytopenia.

### Embodiment 96

[0838] The method of embodiment 86, wherein the side effect is mucositis.

### Embodiment 97

[0839] The method of any one of embodiments 79-96, wherein administration of the peptidomimetic macrocycle increases a maximum tolerated dose of the first additional pharmaceutically-active agent.

### Embodiment 98

[0840] The method of any one of embodiments 79-97, wherein the first additional pharmaceutically-active agent is a topoisomerase inhibitor.

### Embodiment 99

[0841] The method of embodiment 98, wherein the topoisomerase inhibitor is a class II topoisomerase inhibitor.

### Embodiment 100

[0842] The method of embodiment 98, wherein the topoisomerase inhibitor is a class I topoisomerase inhibitor.

### Embodiment 101

[0843] The method of embodiment 98, wherein the topoisomerase inhibitor is topotecan.

### Embodiment 102

[0844] The method of embodiment 98, wherein the topoisomerase inhibitor is rubitecan.

### Embodiment 103

[0845] The method of embodiment 98, wherein the topoisomerase inhibitor is belotecan.

### Embodiment 104

[0846] The method of embodiment 98, wherein the topoisomerase inhibitor is etoposide.

### Embodiment 105

[0847] The method of embodiment 98, wherein the topoisomerase inhibitor is teniposide.

### Embodiment 106

[0848] The method of embodiment 98, wherein the therapeutically effective amount of the first additional pharmaceutically active agent is about 1.5 mg/m².

### Embodiment 107

[0849] The method of any one of embodiments 79-97, wherein the first additional pharmaceutically-active agent is a microtubule disassembly blocker.

### Embodiment 108

[0850] The method of embodiment 107, wherein the microtubule disassembly blocker is docetaxel.

### Embodiment 109

[0851] The method of embodiment 107, wherein the therapeutically effective amount of the first additional pharmaceutically active agent is about 75 mg/m².

### Embodiment 110

[0852] The method of any one of embodiments 79-97, wherein the first additional pharmaceutically-active agent is an alkylating-like agent.

### Embodiment 111

[0853] The method of embodiment 110, wherein the alkylating-like agent is carboplatin.

### Embodiment 112

[0854] The method of any one of embodiments 79-97, wherein the first additional pharmaceutically-active agent is a taxane.

### Embodiment 113

[0855] The method of embodiment 112, wherein the taxane is paclitaxel.

### Embodiment 114

[0856] The method of any one of embodiments 79-113, further comprising administering a therapeutically-effective amount of a second additional pharmaceutically-active agent.

### Embodiment 115

[0857] The method of embodiment 114, wherein the first additional pharmaceutically-active agent is a taxane and the second additional pharmaceutically-active agent is an alkylating-like agent.

### Embodiment 116

[0858] The method of embodiment 115, wherein the taxane is paclitaxel.

### Embodiment 117

[0859] The method of embodiment 115 or 116, wherein the alkylating-like agent is carboplatin.

### Embodiment 118

[0860] The method of embodiment 114, wherein the first additional pharmaceutically-active agent and the second additional pharmaceutically-active agent are administered concurrently.

### Embodiment 119

[0861] The method of embodiment 114, wherein the first additional pharmaceutically-active agent and the second additional pharmaceutically-active agent are administered sequentially.

### Embodiment 120

[0862] The method of any one of embodiments 79-119, wherein the peptidomimetic macrocycle and the first additional pharmaceutically-active agent are administered concurrently.

### Embodiment 121

[0863] The method of any one of embodiments 79-119, wherein the peptidomimetic macrocycle and the first additional pharmaceutically-active agent are administered sequentially.

### Embodiment 122

[0864] The method of any one of embodiments 79-119 or 121, wherein the peptidomimetic macrocycle is administered about 12 hours to about 36 hours before administration of the first additional pharmaceutically-active agent.

### Embodiment 123

[0865] The method of embodiment 122, wherein peptidomimetic macrocycle is administered about 24 hours before administration of the first additional pharmaceutically-active agent.

### Embodiment 124

[0866] The method of any one of embodiments 79-123, wherein:
[0867] the peptidomimetic macrocycle is administered on days 1, 2, 3, 4, and 5 of a 6-day period;
[0868] the peptidomimetic macrocycle is not administered on day 6 of the 6-day period;
[0869] the first additional pharmaceutically-active agent is administered on days 2, 3, 4, 5, and 6 of the 6-day period; and
[0870] the first additional pharmaceutically-active agent is not administered on day 1 of the 6-day period.

### Embodiment 125

[0871] The method of embodiment 124, wherein each administration of the peptidomimetic macrocycle occurs about 12 hours to about 36 hours before each administration of the first additional pharmaceutically-active agent.

### Embodiment 126

[0872] The method of any one of embodiments 79-123, wherein:
[0873] the peptidomimetic macrocycle is administered on days 1, 2, and 3 of a 3-day period;
[0874] the first additional pharmaceutically-active agent is administered on day 2 of the 3-day period; and
[0875] the first additional pharmaceutically-active agent is not administered on day 1 or day 3 of the 3-day period.

### Embodiment 127

[0876] The method of any one of embodiments 79-126, wherein the peptidomimetic macrocycle binds to MDM2.

### Embodiment 128

[0877] The method of any one of embodiments 79-127, wherein the peptidomimetic macrocycle binds to MDMX.

### Embodiment 129

[0878] The method of any one of embodiments 79-126, wherein the peptidomimetic macrocycle binds to MDM2 and MDMX.

### Embodiment 130

[0879] The method of any one of embodiments 79-129, wherein the peptidomimetic macrocycle induces p53-dependent cell cycle arrest in the non-cancerous tissue.

### Embodiment 131

[0880] The method of any one of embodiments 79-130, wherein the therapeutically-effective amount of the peptidomimetic macrocycle is less than an amount of the peptidomimetic macrocycle that is needed to induce apoptosis in the non-cancerous tissue of the subject.

### Embodiment 132

[0881] The method of any one of embodiments 79-131, wherein the peptidomimetic macrocycle is of the formula:

[chemical structure]

or a pharmaceutically acceptable salt thereof, wherein:
[0882] each A, C, D, and E is independently an amino acid;
[0883] each B is independently an amino acid,

[chemical structure]

[—NH-L₃-CO—], [—NH-L₃-SO₂—], or [—NH-L₃-];
[0884] each R₁ and R₂ is independently hydrogen, alkyl, alkenyl, alkynyl, arylalkyl, cycloalkyl, cycloalkylalkyl, heteroalkyl, or heterocycloalkyl, unsubstituted or substituted with halo-; or forms a macrocycle-forming linker L′ connected to the alpha position of one of said D or E amino acids;
[0885] each R₃ is independently hydrogen, alkyl, alkenyl, alkynyl, arylalkyl, heteroalkyl, cycloalkyl, heterocycloalkyl, cycloalkylalkyl, aryl, or heteroaryl, optionally substituted with R₅;
[0886] each L and L′ is independently a macrocycle-forming linker of the formula -L₁-L₂-;
[0887] each L₁, L₂, and L₃ is independently alkylene, alkenylene, alkynylene, heteroalkylene, cycloalkylene, heterocycloalkylene, arylene, heteroarylene, or [—R₄—K—R₄-]ₙ, each being optionally substituted with R₅;
[0888] each R₄ is independently alkylene, alkenylene, alkynylene, heteroalkylene, cycloalkylene, heterocycloalkylene, arylene, or heteroarylene;
[0889] each K is independently O, S, SO, SO₂, CO, CO₂, or CONR₃;
[0890] each R₅ is independently halogen, alkyl, —OR₆, —N(R₆)₂, —SR₆, —SOR₆, —SO₂R₆, —CO₂R₆, a fluorescent moiety, a radioisotope or a therapeutic agent;
[0891] each R₆ is independently hydrogen, alkyl, alkenyl, alkynyl, arylalkyl, cycloalkylalkyl, heterocycloalkyl, a fluorescent moiety, a radioisotope or a therapeutic agent;
[0892] each R₇ is independently hydrogen, alkyl, alkenyl, alkynyl, arylalkyl, cycloalkyl, heteroalkyl, cycloalkylalkyl, heterocycloalkyl, aryl, or heteroaryl, optionally substituted with R₅, or part of a cyclic structure with a D residue;
[0893] each R₈ is independently hydrogen, alkyl, alkenyl, alkynyl, arylalkyl, cycloalkyl, heteroalkyl, cycloalkylalkyl, heterocycloalkyl, aryl, or heteroaryl, optionally substituted with R₅, or part of a cyclic structure with an E residue;
[0894] each v is independently an integer from 1-1000;
[0895] each w is independently an integer from 1-1000;
[0896] u is 1, 2, 3, 4, 5, 6, 7, 8, 9, or 10;
[0897] each x, y and z is independently 1, 2, 3, 4, 5, 6, 7, 8, 9, or 10; and
[0898] each n is independently 1, 2, 3, 4, or 5.

### Embodiment 133

[0899] The method of embodiment 132, wherein v is 3-10.

### Embodiment 134

[0900] The method of embodiment 132, wherein v is 3.

### Embodiment 135

[0901] The method of any one of embodiments 132-134, wherein w is 3-10.

### Embodiment 136

[0902] The method of any one of embodiments 132-134, wherein w is 6.

### Embodiment 137

[0903] The method of any one of embodiments 132-136, wherein each L₁ and L₂ is independently alkylene, alkenylene, alkynylene, heteroalkylene, cycloalkylene, heterocycloalkylene, arylene, or heteroarylene.

### Embodiment 138

[0904] The method of any one of embodiments 132-136, wherein each L₁ and L₂ is independently alkylene or alkenylene.

### Embodiment 139

[0905] The method of any one of embodiments 132-136, wherein each L₁ and L₂ is independently alkylene or alkenylene.

### Embodiment 140

[0906] The method of any one of embodiments 132-139, wherein each R₁ and R₂ is independently hydrogen, alkyl, alkenyl, alkynyl, arylalkyl, cycloalkyl, cycloalkylalkyl, heteroalkyl, or heterocycloalkyl, unsubstituted or substituted with halo-.

### Embodiment 141

[0907] The method of any one of embodiments 132-139, wherein each R₁ and R₂ is independently hydrogen.

### Embodiment 142

[0908] The method of any one of embodiments 132-139, wherein each R₁ and R₂ is independently alkyl.

### Embodiment 143

[0909] The method of any one of embodiments 132-139, wherein each R₁ and R₂ is independently methyl.

### Embodiment 144

[0910] The method of any one of embodiments 132-143, wherein u is 1.

### Embodiment 145

[0911] The method of any one of embodiments 132-144, wherein each E is Ser or Ala, or d-Ala.

### Embodiment 146

[0912] The method of any one of embodiments 79-145, wherein the peptidomimetic macrocycle comprises an amino acid sequence that is at least 60% identical to an amino acid sequence listed Table 1, Table 1a, Table 1b, Table 1c, Table 2a, Table 2b, Table 3, or Table 3a.

### Embodiment 147

[0913] The method of any one of embodiments 79-145, wherein the peptidomimetic macrocycle comprises an amino acid sequence that is at least 80% identical to an amino acid sequence listed in Table 1, Table 1a, Table 1b, Table 1c, Table 2a, Table 2b, Table 3, or Table 3a.

### Embodiment 148

[0914] The method of any one of embodiments 79-147, wherein the subject is a human.

### Embodiment 149

[0915] The method of any one of embodiments 79-148, wherein when, in a controlled study, 2.4 mg/kg of the peptidomimetic macrocycle is administered to a group of mice, changes in:

[0916] (i) an average p21 mRNA expression;

[0917] (ii) an average p53 upregulated modulator of apoptosis (PUMA) mRNA expression; and

[0918] (iii) an average Noxa mRNA expression;

[0919] in bone marrow of the group of mice occur with at most a 30% deviation from corresponding lines illustrated in FIG. 9.

### Embodiment 150

[0920] The method of any one of embodiments 79-148, wherein when, in a controlled study, 5 mg/kg of the peptidomimetic macrocycle is administered to a first group of 5-ethynyl-2′-deoxyuridine (EdU) treated mice, 10 mg/kg of the peptidomimetic macrocycle is administered to a second group of 5-ethynyl-2′-deoxyuridine (EdU) treated mice, and 20 mg/kg of the peptidomimetic macrocycle is administered to a third group of 5-ethynyl-2′-deoxyuridine (EdU) treated mice, a change in a percentage of lineage negative, Kit positive, hematopoietic stem and progenitor cells (HSPCs) that are EdU+ in the first group, the second group, and the third group occurs with at most a 30% deviation from corresponding lines illustrated in FIG. 11.

### Embodiment 151

[0921] The method of any one of embodiments 79-148, wherein:
[0922] the peptidomimetic macrocycle is administered on days 1, 2, 3, 4, and 5 of a 6-day period;
[0923] the peptidomimetic macrocycle is not administered on day 6 of the 6-day period;
[0924] the first additional pharmaceutically-active agent is administered on days 2, 3, 4, 5, and 6 of the 6-day period;
[0925] the first additional pharmaceutically-active agent is not administered on day 1 of the 6-day period; and
[0926] when, in a controlled study:
   [0927] (i) Group A consists of mice treated with 1.5 mg/kg of topotecan on days 2, 3, 4, 5, and 6 of a 6-day study treatment period; and not treated with topotecan on day 1 of the 6-day study treatment period; and
   [0928] (ii) Group B consists of mice treated with 2.4 mg/kg of the peptidomimetic macrocycle on days 1, 2, 3, 4, and 5 of the 6-day study treatment period and 1.5 mg/kg of topotecan on days 2, 3, 4, 5, and 6 of the 6-day study treatment period, wherein the mice of Group B are not treated with the peptidomimetic macrocycle on day 6 of the 6-day study treatment period and are not treated with topotecan on day 1 of the 6-day study treatment period;

[0929] a number of neutrophils present per μL of blood in mice of Group B is increased compared to a number of neutrophils present per μL of blood in mice of Group A as illustrated in FIG. 16D.

### Embodiment 152

[0930] The method of any one of embodiments 79-148, wherein:
[0931] the peptidomimetic macrocycle is administered on days 1, 2, 3, 4, and 5 of a 6-day period;
[0932] the peptidomimetic macrocycle is not administered on day 6 of the 6-day period;
[0933] the first additional pharmaceutically-active agent is administered on days 2, 3, 4, 5, and 6 of the 6-day period;
[0934] the first additional pharmaceutically-active agent is not administered on day 1 of the 6-day period; and
[0935] when, in a controlled study:
   [0936] (i) Group A consists of mice treated with 1.5 mg/kg of topotecan on days 2, 3, 4, 5, and 6 of a 6-day study treatment period; and not treated with topotecan on day 1 of the 6-day study treatment period; and
   [0937] (ii) Group B consists of mice treated with 2.4 mg/kg of the peptidomimetic macrocycle on days 1, 2, 3, 4, and 5 of the 6-day study treatment period and 1.5 mg/kg of topotecan on days 2, 3, 4, 5, and 6 of the 6-day study treatment period, wherein the mice of Group B are not treated with the peptidomimetic macrocycle on day 6 of the 6-day study treatment period and are not treated with topotecan on day 1 of the 6-day study treatment period;

[0938] a number of neutrophils present per μL of blood in mice of Group B is increased compared to a number of neutrophils present per μL of blood in mice of Group A as illustrated in FIG. 16C.

### Embodiment 153

[0939] The method of any one of embodiments 79-148, wherein:
[0940] the peptidomimetic macrocycle is administered on days 1, 2, 3, 4, and 5 of a 6-day period;
[0941] the peptidomimetic macrocycle is not administered on day 6 of the 6-day period;
[0942] the first additional pharmaceutically-active agent is administered on days 2, 3, 4, 5, and 6 of the 6-day period;
[0943] the first additional pharmaceutically-active agent is not administered on day 1 of the 6-day period; and
[0944] when, in a controlled study:
   [0945] (i) Group A consists of mice treated with 1.5 mg/kg of topotecan on days 2, 3, 4, 5, and 6 of a 6-day study treatment period; and not treated with topotecan on day 1 of the 6-day study treatment period; and
   [0946] (ii) Group B consists of mice treated with 2.4 mg/kg of the peptidomimetic macrocycle on days 1, 2, 3, 4, and 5 of the 6-day study treatment period and 1.5 mg/kg of topotecan on days 2, 3, 4, 5, and 6 of the 6-day study treatment period, wherein the mice of Group B are not treated with the peptidomimetic macrocycle on day 6 of the 6-day study treatment period and are not treated with topotecan on day 1 of the 6-day study treatment period;

[0947] a measure of hypertrophy/hyperplasia in digestive tract tissue in mice of Group B is modified compared to a measure of hypertrophy/hyperplasia in digestive tract tissue in mice of Group A as illustrated in FIG. 24B.

### Embodiment 154

[0948] The method of any one of embodiments 79-148, wherein:
[0949] the peptidomimetic macrocycle is administered on days 1, 2, 3, 4, and 5 of a 6-day period;
[0950] the peptidomimetic macrocycle is not administered on day 6 of the 6-day period;
[0951] the first additional pharmaceutically-active agent is administered on days 2, 3, 4, 5, and 6 of the 6-day period;
[0952] the first additional pharmaceutically-active agent is not administered on day 1 of the 6-day period; and
[0953] when, in a controlled study:
   [0954] (i) Group A consists of mice treated with 1.5 mg/kg of topotecan on days 2, 3, 4, 5, and 6 of a 6-day study treatment period; and not treated with topotecan on day 1 of the 6-day study treatment period; and
   [0955] (ii) Group B consists of mice treated with 2.4 mg/kg of the peptidomimetic macrocycle on days 1, 2, 3, 4, and 5 of the 6-day study treatment period and 1.5 mg/kg of topotecan on days 2, 3, 4, 5, and 6 of the 6-day study treatment period, wherein the mice of Group B are not treated with the peptidomimetic macrocycle on day 6 of the 6-day study treatment period and are not treated with topotecan on day 1 of the 6-day study treatment period;

[0956] digestive tract tissue samples from about 80% of mice of Group B mice have a hypertrophy/hyperplasia score of 2, and digestive tract tissue samples from about 70% of mice of Group A have a hypertrophy/hyperplasia score of 3.

### Embodiment 155

[0957] The method of embodiment 114, wherein:
[0958] a first administration of the peptidomimetic macrocycle occurs 8 hours prior to the administration of the first additional pharmaceutically-active agent;
[0959] a second administration of the peptidomimetic macrocycle occurs 1 hour prior to the administration of the first additional pharmaceutically-active agent;
[0960] a third administration of the peptidomimetic macrocycle occurs 8 hours after the administration of the first additional pharmaceutically-active agent;
[0961] when, in a controlled study:
   [0962] (i) Group A consists of mice treated with 25 mg/kg carboplatin and 5 mg/kg paclitaxel at a first timepoint;
   [0963] (ii) Group B consists of mice treated with 25 mg/kg carboplatin and 5 mg/kg paclitaxel at the first timepoint and 2.4 mg/kg of the peptidomimetic macrocycle at a second timepoint, a third timepoint, and a fourth timepoint; and
   [0964] (iii) the second timepoint is about 8 hours prior to the first timepoint, the third timepoint is about 1 hour prior to the first timepoint, and the fourth timepoint is about 8 hours after the first timepoint;

[0965] a number of neutrophils present per μL of blood in mice of Group B is increased compared to a number of neutrophils present per μL of blood in mice of Group A as illustrated in FIG. 18B.

### Embodiment 156

[0966] A method of treating a tumor in a subject in need thereof, the method comprising administering to the subject a therapeutically effective amount of a peptidomimetic macrocycle and a therapeutically effective amount of a first additional pharmaceutically-active agent, wherein:
[0967] the administration of the peptidomimetic macrocycle does not induce cell cycle arrest in the tumor;
[0968] the administration of the peptidomimetic macrocycle does not induce apoptosis in the tumor;
[0969] the therapeutically effective amount of the first additional pharmaceutically-active agent is associated with a side effect; and
[0970] the administration of the peptidomimetic macrocycle reduces a likelihood of the subject developing the side effect.

### Embodiment 157

[0971] The method of embodiment 156, wherein the subject is a human.

### Embodiment 158

[0972] The method of embodiment 156 or 157, wherein administration of the peptidomimetic macrocycle induces cell cycle arrest in a non-cancerous tissue.

### Embodiment 159

[0973] The method of any one of embodiments 156-158, wherein the tumor has a p53 deactivating mutation.

### Embodiment 160

[0974] The method of embodiment 159, further comprising detecting the p53 deactivating mutation.

### Embodiment 161

[0975] The method of any one of embodiments 156-160, wherein administration of the peptidomimetic macrocycle reduces a level of the side effect.

### Embodiment 162

[0976] The method of any one of embodiments 156-161, wherein the side effect is associated with myelosuppression.

### Embodiment 163

[0977] The method of any one of embodiments 156-161, wherein the side effect is associated with digestive tract tissue.

### Embodiment 164

[0978] The method of any one of embodiments 156-162, wherein the side effect is neutropenia.

### Embodiment 165

[0979] The method of any one of embodiments 156-162, wherein the side effect is thrombocytopenia.

### Embodiment 166

[0980] The method of any one of embodiments 156-161 or 163, wherein the side effect is mucositis.

### Embodiment 167

[0981] The method of any one of embodiments 156-166, wherein administration of the peptidomimetic macrocycle increases a maximum tolerated dose of the first additional pharmaceutically-active agent.

### Embodiment 168

[0982] The method of any one of embodiments 156-167, wherein the first additional pharmaceutically-active agent is a topoisomerase inhibitor.

### Embodiment 169

[0983] The method of embodiment 168, wherein the topoisomerase inhibitor is a class I topoisomerase inhibitor.

### Embodiment 170

[0984] The method of embodiment 168, wherein the topoisomerase inhibitor is a class II topoisomerase inhibitor.

### Embodiment 171

[0985] The method of embodiment 168, wherein the topoisomerase inhibitor is topotecan.

### Embodiment 172

[0986] The method of embodiment 168, wherein the topoisomerase inhibitor is rubitecan.

### Embodiment 173

[0987] The method of embodiment 168, wherein the topoisomerase inhibitor is belotecan.

### Embodiment 174

[0988] The method of embodiment 168, wherein the topoisomerase inhibitor is etoposide.

### Embodiment 175

[0989] The method of embodiment 168, wherein the topoisomerase inhibitor is teniposide.

### Embodiment 176

[0990] The method of embodiment 168, wherein the therapeutically effective amount of the first additional pharmaceutically active agent is about 1.5 mg/m².

### Embodiment 177

[0991] The method of any one of embodiments 156-167, wherein the first additional pharmaceutically-active agent is a microtubule disassembly blocker.

### Embodiment 178

[0992] The method of embodiment 177, wherein the microtubule disassembly blocker is docetaxel.

### Embodiment 179

[0993] The method of embodiment 177, wherein the therapeutically effective amount of the first additional pharmaceutically active agent is about 75 mg/m².

### Embodiment 180

[0994] The method of any one of embodiments 156-167, wherein the first additional pharmaceutically-active agent is an alkylating-like agent.

### Embodiment 181

[0995] The method of embodiment 180, wherein the alkylating-like agent is carboplatin.

### Embodiment 182

[0996] The method of any one of embodiments 156-167, wherein the first additional pharmaceutically-active agent is a taxane.

### Embodiment 183

[0997] The method of embodiment 182, wherein the taxane is paclitaxel.

### Embodiment 184

[0998] The method of any one of embodiments 156-183, further comprising administering a therapeutically-effective amount of a second additional pharmaceutically-active agent.

### Embodiment 185

[0999] The method of embodiment 184, wherein the first additional pharmaceutically-active agent is a taxane and the second additional pharmaceutically-active agent is an alkylating-like agent.

### Embodiment 186

[1000] The method of embodiment 185, wherein the taxane is paclitaxel.

### Embodiment 187

[1001] The method of embodiment 185 or 186, wherein the alkylating-like agent is carboplatin.

### Embodiment 188

[1002] The method of any one of embodiments 184-187, wherein the first additional pharmaceutically-active agent and the second additional pharmaceutically-active agent are administered concurrently.

### Embodiment 189

[1003] The method of any one of embodiments 184-187, wherein the first additional pharmaceutically-active agent and the second additional pharmaceutically-active agent are administered sequentially.

### Embodiment 190

[1004] The method of any one of embodiments 156-189, wherein the peptidomimetic macrocycle and the first additional pharmaceutically-active agent are administered concurrently.

### Embodiment 191

[1005] The method of any one of embodiments 156-189, wherein the peptidomimetic macrocycle and the first additional pharmaceutically-active agent are administered sequentially.

### Embodiment 192

[1006] The method of any one of embodiments 156-189 or 191, wherein the peptidomimetic macrocycle is administered about 12 hours to about 36 hours before administration of the first additional pharmaceutically-active agent.

### Embodiment 193

[1007] The method of embodiment 192, wherein the peptidomimetic macrocycle is administered about 24 hours before administration of the first additional pharmaceutically-active agent.

### Embodiment 194

[1008] The method of any one of embodiments 156-193, wherein:
[1009] the peptidomimetic macrocycle is administered on days 1, 2, 3, 4, and 5 of a 6-day period;
[1010] the peptidomimetic macrocycle is not administered on day 6 of the 6-day period;
[1011] the first additional pharmaceutically-active agent is administered on days 2, 3, 4, 5, and 6 of the 6-day period; and
[1012] the first additional pharmaceutically-active agent is not administered on day 1 of the 6-day period.

### Embodiment 195

[1013] The method of embodiment 194, wherein each administration of the peptidomimetic macrocycle occurs about 12 hours to about 36 hours before each administration of the first additional pharmaceutically-active agent.

### Embodiment 196

[1014] The method of any one of embodiments 156-193, wherein:
[1015] the peptidomimetic macrocycle is administered on days 1, 2, and 3 of a 3-day period;
[1016] the first additional pharmaceutically-active agent is administered on day 2 of the 3-day period; and
[1017] the first additional pharmaceutically-active agent is not administered on day 1 or day 3 of the 3-day period.

### Embodiment 197

[1018] The method of any one of embodiments 156-196, wherein the peptidomimetic macrocycle binds to MDM2.

### Embodiment 198

[1019] The method of any one of embodiments 156-197, wherein the peptidomimetic macrocycle binds to MDMX.

### Embodiment 199

[1020] The method of any one of embodiments 156-196, wherein the peptidomimetic macrocycle binds to MDM2 and MDMX.

### Embodiment 200

[1021] The method of any one of embodiments 156-199, wherein the peptidomimetic macrocycle induces p53-dependent cell cycle arrest in a non-cancerous tissue.

### Embodiment 201

[1022] The method of any one of embodiments 156-200, wherein the therapeutically-effective amount of the peptidomimetic macrocycle is less than an amount of the peptidomimetic macrocycle that is needed to induce apoptosis in the non-cancerous tissue of the subject.

### Embodiment 202

[1023] The method of any one of embodiments 156-201, wherein the peptidomimetic macrocycle is of the formula:

[chemical structure]

or a pharmaceutically acceptable salt thereof, wherein:
[1024] each A, C, D, and E is independently an amino acid;
[1025] each B is independently an amino acid,

[chemical structure]

[—NH-L₃-CO—], [—NH-L₃-SO₂—], or [—NH-L₃-];
[1026] each R₁ and R₂ is independently hydrogen, alkyl, alkenyl, alkynyl, arylalkyl, cycloalkyl, cycloalkylalkyl, heteroalkyl, or heterocycloalkyl, unsubstituted or substituted with halo-; or forms a macrocycle-forming linker L′ connected to the alpha position of one of said D or E amino acids;
[1027] each R₃ is independently hydrogen, alkyl, alkenyl, alkynyl, arylalkyl, heteroalkyl, cycloalkyl, heterocycloalkyl, cycloalkylalkyl, aryl, or heteroaryl, optionally substituted with R₅;
[1028] each L and L′ is independently a macrocycle-forming linker of the formula -L₁-L₂-;
[1029] each L₁, L₂, and L₃ is independently alkylene, alkenylene, alkynylene, heteroalkylene, cycloalkylene, heterocycloalkylene, arylene, heteroarylene, or [—R₄—K—R₄-]ₙ, each being optionally substituted with R₅;
[1030] each R₄ is independently alkylene, alkenylene, alkynylene, heteroalkylene, cycloalkylene, heterocycloalkylene, arylene, or heteroarylene;
[1031] each K is independently O, S, SO, SO₂, CO, CO₂, or CONR₃;
[1032] each R₅ is independently halogen, alkyl, —OR₆, —N(R₆)₂, —SR₆, —SOR₆, —SO₂R₆, —CO₂R₆, a fluorescent moiety, a radioisotope or a therapeutic agent;
[1033] each R₆ is independently hydrogen, alkyl, alkenyl, alkynyl, arylalkyl, cycloalkylalkyl, heterocycloalkyl, a fluorescent moiety, a radioisotope or a therapeutic agent;
[1034] each R₇ is independently hydrogen, alkyl, alkenyl, alkynyl, arylalkyl, cycloalkyl, heteroalkyl, cycloalkylalkyl, heterocycloalkyl, aryl, or heteroaryl, optionally substituted with R₅, or part of a cyclic structure with a D residue;
[1035] each R₈ is independently hydrogen, alkyl, alkenyl, alkynyl, arylalkyl, cycloalkyl, heteroalkyl, cycloalkylalkyl, heterocycloalkyl, aryl, or heteroaryl, optionally substituted with R₅, or part of a cyclic structure with an E residue;
[1036] each v is independently an integer from 1-1000;
[1037] each w is independently an integer from 1-1000;
[1038] u is 1, 2, 3, 4, 5, 6, 7, 8, 9, or 10;
[1039] each x, y and z is independently 1, 2, 3, 4, 5, 6, 7, 8, 9, or 10; and
[1040] each n is independently 1, 2, 3, 4, or 5.

### Embodiment 203

[1041] The method of embodiment 202, wherein v is 3-10.

### Embodiment 204

[1042] The method of embodiment 202, wherein v is 3.

### Embodiment 205

[1043] The method of any one of embodiments 202-204, wherein w is 3-10.

### Embodiment 206

[1044] The method of any one of embodiments 202-204, wherein w is 6.

### Embodiment 207

[1045] The method of any one of embodiments 202-206, wherein x+y+z=6.

### Embodiment 208

[1046] The method of any one of embodiments 202-207, wherein each L₁ and L₂ is independently alkylene, alkenylene, alkynylene, heteroalkylene, cycloalkylene, heterocycloalkylene, arylene, or heteroarylene.

### Embodiment 209

[1047] The method of any one of embodiments 202-207, wherein each L₁ and L₂ is independently alkylene or alkenylene.

### Embodiment 210

[1048] The method of any one of embodiments 202-209, wherein each R₁ and R₂ is independently hydrogen, alkyl, alkenyl, alkynyl, arylalkyl, cycloalkyl, cycloalkylalkyl, heteroalkyl, or heterocycloalkyl, unsubstituted or substituted with halo-.

### Embodiment 211

[1049] The method of any one of embodiments 202-209, wherein each R₁ and R₂ is independently hydrogen.

### Embodiment 212

[1050] The method of any one of embodiments 202-209, wherein each R₁ and R₂ is independently alkyl.

### Embodiment 213

[1051] The method of any one of embodiments 202-209, wherein each R₁ and R₂ is independently methyl.

### Embodiment 214

[1052] The method of any one of embodiments 202-213, wherein u is 1.

### Embodiment 215

[1053] The method of any one of embodiments 202-214, wherein each E is Ser or Ala, or d-Ala.

### Embodiment 216

[1054] The method of any one of embodiments 156-215, wherein the peptidomimetic macrocycle comprises an amino acid sequence that is at least 60% identical to an amino acid sequence listed Table 1, Table 1a, Table 1b, Table 1c, Table 2a, Table 2b, Table 3, or Table 3a.

### Embodiment 217

[1055] The method of any one of embodiments 156-215, wherein the peptidomimetic macrocycle comprises an amino acid sequence that is at least 80% identical to an amino acid sequence listed in Table 1, Table 1a, Table 1b, Table 1c, Table 2a, Table 2b, Table 3, or Table 3a.

### Embodiment 218

[1056] The method of any one of embodiments 156-217, wherein when, in a controlled study, 2.4 mg/kg of the peptidomimetic macrocycle is administered to a group of mice, changes in:

[1057] (i) an average p21 mRNA expression;

[1058] (ii) an average p53 upregulated modulator of apoptosis (PUMA) mRNA expression; and

[1059] (iii) an average Noxa mRNA expression;

[1060] in bone marrow of the group of mice occur with at most a 30% deviation from corresponding lines illustrated in FIG. 9.

### Embodiment 219

[1061] The method of any one of embodiments 156-217, wherein when, in a controlled study, 5 mg/kg of the peptidomimetic macrocycle is administered to a first group of 5-ethynyl-2′-deoxyuridine (EdU) treated mice, 10 mg/kg of the peptidomimetic macrocycle is administered to a second group of 5-ethynyl-2′-deoxyuridine (EdU) treated mice, and 20 mg/kg of the peptidomimetic macrocycle is administered to a third group of 5-ethynyl-2′-deoxyuridine (EdU) treated mice, a change in a percentage of lineage negative, Kit positive, hematopoietic stem and progenitor cells (HSPCs) that are EdU+ in the first group, the second group, and the third group occurs with at most a 30% deviation from corresponding lines illustrated in FIG. 11.

### Embodiment 220

[1062] The method of any one of embodiments 156-217, wherein:
[1063] the peptidomimetic macrocycle is administered on days 1, 2, 3, 4, and 5 of a 6-day period;
[1064] the peptidomimetic macrocycle is not administered on day 6 of the 6-day period;
[1065] the first additional pharmaceutically-active agent is administered on days 2, 3, 4, 5, and 6 of the 6-day period;
[1066] the first additional pharmaceutically-active agent is not administered on day 1 of the 6-day period; and
[1067] when, in a controlled study:
   [1068] (i) Group A consists of mice treated with 1.5 mg/kg of topotecan on days 2, 3, 4, 5, and 6 of a 6-day study treatment period; and not treated with topotecan on day 1 of the 6-day study treatment period; and
   [1069] (ii) Group B consists of mice treated with 2.4 mg/kg of the peptidomimetic macrocycle on days 1, 2, 3, 4, and 5 of the 6-day study treatment period and 1.5 mg/kg of topotecan on days 2, 3, 4, 5, and 6 of the 6-day study treatment period, wherein the mice of Group B are not treated with the peptidomimetic macrocycle on day 6 of the 6-day study treatment period and are not treated with topotecan on day 1 of the 6-day study treatment period;

[1070] a number of neutrophils present per μL of blood in mice of Group B is increased compared to a number of neutrophils present per μL of blood in mice of Group A as illustrated in FIG. 16D.

### Embodiment 221

[1071] The method of any one of embodiments 156-217, wherein:
[1072] the peptidomimetic macrocycle is administered on days 1, 2, 3, 4, and 5 of a 6-day period;
[1073] the peptidomimetic macrocycle is not administered on day 6 of the 6-day period;
[1074] the first additional pharmaceutically-active agent is administered on days 2, 3, 4, 5, and 6 of the 6-day period;
[1075] the first additional pharmaceutically-active agent is not administered on day 1 of the 6-day period; and
[1076] when, in a controlled study:
   [1077] (i) Group A consists of mice treated with 1.5 mg/kg of topotecan on days 2, 3, 4, 5, and 6 of a 6-day study treatment period; and not treated with topotecan on day 1 of the 6-day study treatment period; and
   [1078] (ii) Group B consists of mice treated with 2.4 mg/kg of the peptidomimetic macrocycle on days 1, 2, 3, 4, and 5 of the 6-day study treatment period and 1.5 mg/kg of topotecan on days 2, 3, 4, 5, and 6 of the 6-day study treatment period, wherein the mice of Group B are not treated with the peptidomimetic macrocycle on day 6 of the 6-day study treatment period and are not treated with topotecan on day 1 of the 6-day study treatment period;

[1079] a number of neutrophils present per μL of blood in mice of Group B is increased compared to a number of neutrophils present per μL of blood in mice of Group A as illustrated in FIG. 16C.

### Embodiment 222

[1080] The method of any one of embodiments 156-217, wherein:
[1081] the peptidomimetic macrocycle is administered on days 1, 2, 3, 4, and 5 of a 6-day period;
[1082] the peptidomimetic macrocycle is not administered on day 6 of the 6-day period;
[1083] the first additional pharmaceutically-active agent is administered on days 2, 3, 4, 5, and 6 of the 6-day period;
[1084] the first additional pharmaceutically-active agent is not administered on day 1 of the 6-day period; and
[1085] when, in a controlled study:
   [1086] (i) Group A consists of mice treated with 1.5 mg/kg of topotecan on days 2, 3, 4, 5, and 6 of a 6-day study treatment period; and not treated with topotecan on day 1 of the 6-day study treatment period; and
   [1087] (ii) Group B consists of mice treated with 2.4 mg/kg of the peptidomimetic macrocycle on days 1, 2, 3, 4, and 5 of the 6-day study treatment period and 1.5 mg/kg of topotecan on days 2, 3, 4, 5, and 6 of the 6-day study treatment period, wherein the mice of Group B are not treated with the peptidomimetic macrocycle on day 6 of the 6-day study treatment period and are not treated with topotecan on day 1 of the 6-day study treatment period;

[1088] a measure of hypertrophy/hyperplasia in digestive tract tissue in mice of Group B is modified compared to a measure of hypertrophy/hyperplasia in digestive tract tissue in mice of Group A as illustrated in FIG. 24B.

### Embodiment 223

[1089] The method of any one of embodiments 156-217, wherein:
[1090] the peptidomimetic macrocycle is administered on days 1, 2, 3, 4, and 5 of a 6-day period;
[1091] the peptidomimetic macrocycle is not administered on day 6 of the 6-day period;
[1092] the first additional pharmaceutically-active agent is administered on days 2, 3, 4, 5, and 6 of the 6-day period;
[1093] the first additional pharmaceutically-active agent is not administered on day 1 of the 6-day period; and
[1094] when, in a controlled study:
   [1095] (i) Group A consists of mice treated with 1.5 mg/kg of topotecan on days 2, 3, 4, 5, and 6 of a 6-day study treatment period; and not treated with topotecan on day 1 of the 6-day study treatment period; and
   [1096] (ii) Group B consists of mice treated with 2.4 mg/kg of the peptidomimetic macrocycle on days 1, 2, 3, 4, and 5 of the 6-day study treatment period and 1.5 mg/kg of topotecan on days 2, 3, 4, 5, and 6 of the 6-day study treatment period, wherein the mice of Group B are not treated with the peptidomimetic macrocycle on day 6 of the 6-day study treatment period and are not treated with topotecan on day 1 of the 6-day study treatment period;

[1097] digestive tract tissue samples from about 80% of mice of Group B mice have a hypertrophy/hyperplasia score of 2, and digestive tract tissue samples from about 70% of mice of Group A have a hypertrophy/hyperplasia score of 3.

### Embodiment 224

[1098] The method of any one of embodiments 156-217, wherein:
[1099] a first administration of the peptidomimetic macrocycle occurs 8 hours prior to the administration of the first additional pharmaceutically-active agent;
[1100] a second administration of the peptidomimetic macrocycle occurs 1 hour prior to the administration of the first additional pharmaceutically-active agent;
[1101] a third administration of the peptidomimetic macrocycle occurs 8 hours after the administration of the first additional pharmaceutically-active agent;
[1102] when, in a controlled study:
   [1103] (i) Group A consists of mice treated with 25 mg/kg carboplatin and 5 mg/kg paclitaxel at a first timepoint;

[1104] (ii) Group B consists of mice treated with 25 mg/kg carboplatin and 5 mg/kg paclitaxel at the first timepoint and 2.4 mg/kg of the peptidomimetic macrocycle at a second timepoint, a third timepoint, and a fourth timepoint; and

[1105] (iii) the second timepoint is about 8 hours prior to the first timepoint, the third timepoint is about 1 hour prior to the first timepoint, and the fourth timepoint is about 8 hours after the first timepoint;

[1106] a number of neutrophils present per μL of blood in mice of Group B is increased compared to a number of neutrophils present per μL of blood in mice of Group A as illustrated in FIG. 18B.

### Embodiment 225

[1107] The method of any one of embodiments 1-22 or 43-78, wherein the first additional pharmaceutically-active agent is a chemotherapeutic agent.

### Embodiment 226

[1108] The method of any one of embodiments 1-22 or 43-78, wherein the first additional pharmaceutically-active agent is an antineoplastic agent.

### Embodiment 227

[1109] The method of any one of embodiments 79-97, or 120-155, wherein the first additional pharmaceutically-active agent is a chemotherapeutic agent.

### Embodiment 228

[1110] The method of any one of embodiments 79-97, or 120-155, wherein the first additional pharmaceutically-active agent is an antineoplastic agent.

### Embodiment 229

[1111] The method of any one of embodiments 156-167, or 190-224, wherein the first additional pharmaceutically-active agent is a chemotherapeutic agent.

### Embodiment 230

[1112] The method of any one of embodiments 156-167, or 190-224, wherein the first additional pharmaceutically-active agent is an antineoplastic agent.

1. A method of treating a tumor in a subject in need thereof, the method comprising administering to the subject a therapeutically effective amount of a peptidomimetic macrocycle and a therapeutically effective amount of an additional pharmaceutically-active agent, wherein:
the administration of the peptidomimetic macrocycle induces cell cycle arrest in a non-cancerous tissue in the subject;
the administration of the peptidomimetic macrocycle does not induce cell cycle arrest in the tumor; and
the administration of the peptidomimetic macrocycle does not induce apoptosis in the tumor.

2. (canceled)

3. (canceled)

4. (canceled)

5. The method of claim 1, wherein administration of the peptidomimetic macrocycle reduces a level of a side effect in the subject, wherein the side effect is associated with administration of the additional pharmaceutically-active agent.

6-10. (canceled)

11. The method of claim 5, wherein the side effect is associated with myelosuppression.

12. The method of claim 5, wherein the side effect is associated with digestive tissue.

13. The method of claim 5, wherein the side effect is neutropenia.

14. The method of claim 5, wherein the side effect is thrombocytopenia.

15. The method of claim 5, wherein the side effect is mucositis.

16. The method of claim 1, wherein the additional pharmaceutically-active agent is a chemotherapeutic agent.

17. The method of claim 1, wherein the additional pharmaceutically-active agent is an antineoplastic agent.

18. The method of claim 1, wherein the additional pharmaceutically-active agent is a topoisomerase inhibitor.

19. (canceled)

20. The method of claim 1, wherein the additional pharmaceutically-active agent is an alkylating-like agent.

21. The method of claim 1, wherein the additional pharmaceutically-active agent is a taxane.

22-25. (canceled)

26. The method of claim 1, wherein:
the peptidomimetic macrocycle is administered on days 1, 2, 3, 4, and 5 of a 6-day period;
the peptidomimetic macrocycle is not administered on day 6 of the 6-day period;
the additional pharmaceutically-active agent is administered on days 2, 3, 4, 5, and 6 of the 6-day period; and
the additional pharmaceutically-active agent is not administered on day 1 of the 6-day period.

27. (canceled)

28. The method of claim 1, wherein the peptidomimetic macrocycle binds to MDM2.

29. The method of claim 1, wherein the peptidomimetic macrocycle binds to MDMX.

30. (canceled)

31. The method of claim 1, wherein the peptidomimetic macrocycle induces p53-dependent cell cycle arrest in the non-cancerous tissue.

32. (canceled)

33. The method of claim 1, wherein the peptidomimetic macrocycle is of the formula: [chemical structure]
or a pharmaceutically acceptable salt thereof, wherein:
each A, C, D, and E is independently an amino acid;
each B is independently an amino acid, [chemical structure]
[—NH-L₃-CO—], [—NH-L₃-SO₂—], or [—NH-L₃-];
each R₁ and R₂ is independently hydrogen, alkyl, alkenyl, alkynyl, arylalkyl, cycloalkyl, cycloalkylalkyl, heteroalkyl, or heterocycloalkyl, unsubstituted or substituted with halo-; or
forms a macrocycle-forming linker L′ connected to the alpha position of one of said D or E amino acids;
each R₃ is independently hydrogen, alkyl, alkenyl, alkynyl, arylalkyl, heteroalkyl, cycloalkyl, heterocycloalkyl, cycloalkylalkyl, aryl, or heteroaryl, optionally substituted with R₅;
each L and L′ is independently a macrocycle-forming linker of the formula -L₁-L₂-;
each L₁, L₂, and L₃ is independently alkylene, alkenylene, alkynylene, heteroalkylene, cycloalkylene, heterocycloalkylene, arylene, heteroarylene, or [—R₄—K—R₄—]ₙ, each being optionally substituted with R₅;
each R₄ is independently alkylene, alkenylene, alkynylene, heteroalkylene, cycloalkylene, heterocycloalkylene, arylene, or heteroarylene;
each K is independently O, S, SO, SO₂, CO, CO₂, or CONR₃;
each R₅ is independently halogen, alkyl, —OR₆, —N(R₆)₂, —SR₆, —SOR₆, —SO₂R₆, —CO₂R₆, a fluorescent moiety, a radioisotope or a therapeutic agent;
each R₆ is independently hydrogen, alkyl, alkenyl, alkynyl, arylalkyl, cycloalkylalkyl, heterocycloalkyl, a fluorescent moiety, a radioisotope or a therapeutic agent;
each R₇ is independently hydrogen, alkyl, alkenyl, alkynyl, arylalkyl, cycloalkyl, heteroalkyl, cycloalkylalkyl, heterocycloalkyl, aryl, or heteroaryl, optionally substituted with R₅, or part of a cyclic structure with a D residue;
each R₈ is independently hydrogen, alkyl, alkenyl, alkynyl, arylalkyl, cycloalkyl, heteroalkyl, cycloalkylalkyl, heterocycloalkyl, aryl, or heteroaryl, optionally substituted with R₅, or part of a cyclic structure with an E residue;
each v is independently an integer from 1-1000;
each w is independently an integer from 1-1000;
u is 1, 2, 3, 4, 5, 6, 7, 8, 9, or 10;
each x, y and z is independently 1, 2, 3, 4, 5, 6, 7, 8, 9, or 10; and
each n is independently 1, 2, 3, 4, or 5.

34. (canceled)

35. The method of claim 1, wherein the peptidomimetic macrocycle comprises an amino acid sequence that is at least 80% identical to an amino acid sequence listed in Table 1, Table 1a, Table 1b, Table 1c, Table 2a, Table 2b, Table 3, or Table 3a.

36. The method of claim 1, wherein the subject is a human.

37-41. (canceled)

42. The method of claim 1, wherein:
the peptidomimetic macrocycle is administered on days 1, 2, 3, 4, and 5 of a 6-day period;
the peptidomimetic macrocycle is not administered on day 6 of the 6-day period;
the additional pharmaceutically-active agent is administered on days 2, 3, 4, 5, and 6 of the 6-day period;
the additional pharmaceutically-active agent is not administered on day 1 of the 6-day period; and
when, in a controlled study:
(i) Group A consists of mice treated with 1.5 mg/kg of topotecan on days 2, 3, 4, 5, and 6 of a 6-day study treatment period; and not treated with topotecan on day 1 of the 6-day study treatment period; and
(ii) Group B consists of mice treated with 2.4 mg/kg of the peptidomimetic macrocycle on days 1, 2, 3, 4, and 5 of the 6-day study treatment period and 1.5 mg/kg of topotecan on days 2, 3, 4, 5, and 6 of the 6-day study treatment period, wherein the mice of Group B are not treated with the peptidomimetic macrocycle on day 6 of the 6-day study treatment period and are not treated with topotecan on day 1 of the 6-day study treatment period;
digestive tract tissue samples from about 80% of mice of Group B mice have a hypertrophy/hyperplasia score of 2, and digestive tract tissue samples from about 70% of mice of Group A have a hypertrophy/hyperplasia score of 3.

43. (canceled)

The application's sequence listing, which the Patent Office published only in electronic form, follows.

SEQUENCE LISTING (1949 sequences)

SEQ ID NO: 1 - protein, 12 aa, Artificial Sequence
  Description of Artificial Sequence: Synthetic peptide
  N-term Ac
  MOD_RES (2)..(2): Alpha-Me R8-octenyl-alanine olefin amino acid connected by an all-carbon crosslinker comprising one double bond
  misc_feature (2)..(9): Crosslink between residues
  MOD_RES (7)..(7): Ac3c
  MOD_RES (9)..(9): Alpha-Me S5-pentenyl-alanine olefin amino acid connected by an all-carbon crosslinker comprising one double bond
  C-term NH2
FAAYWEXLAAAA

SEQ ID NO: 2 - protein, 12 aa, Artificial Sequence
  Description of Artificial Sequence: Synthetic peptide
  N-term Ac
  MOD_RES (2)..(2): Alpha-Me R8-octenyl-alanine olefin amino acid connected by an all-carbon crosslinker comprising one double bond
  misc_feature (2)..(9): Crosslink between residues
  MOD_RES (7)..(7): Ac3c
  MOD_RES (9)..(9): Alpha-Me S5-pentenyl-alanine olefin amino acid connected by an all-carbon crosslinker comprising one double bond
  MOD_RES (11)..(11): 2-aminoisobutyric acid
  C-term NH2
FAAYWEXLAAXA

SEQ ID NO: 3 - protein, 14 aa, Artificial Sequence
  Description of Artificial Sequence: Synthetic peptide
  N-term Ac
  MOD_RES (4)..(4): Alpha-Me R8-octenyl-alanine olefin amino acid connected by an all-carbon crosslinker comprising one double bond
  misc_feature (4)..(11): Crosslink between residues
  MOD_RES (11)..(11): Alpha-Me S5-pentenyl-alanine olefin amino acid connected by an all-carbon crosslinker comprising one double bond
  MOD_RES (14)..(14): Norleucine
  C-term NH2
LTFAAYWAQLASAL

SEQ ID NO: 4 - protein, 14 aa, Artificial Sequence
  Description of Artificial Sequence: Synthetic peptide
  N-term Ac
  MOD_RES (4)..(4): Alpha-Me R8-octenyl-alanine olefin amino acid connected by an all-carbon crosslinker comprising one double bond
  misc_feature (4)..(11): Crosslink between residues
  MOD_RES (11)..(11): Alpha-Me S5-pentenyl-alanine olefin amino acid connected by an all-carbon crosslinker comprising one double bond
  C-term NH2
LTFAAYWAQLASAL

SEQ ID NO: 5 - protein, 14 aa, Artificial Sequence
  Description of Artificial Sequence: Synthetic peptide
  N-term Ac
  MOD_RES (4)..(4): Alpha-Me R8-octenyl-alanine olefin amino acid connected by an all-carbon crosslinker comprising one double bond
  misc_feature (4)..(11): Crosslink between residues
  MOD_RES (11)..(11): Alpha-Me S5-pentenyl-alanine olefin amino acid connected by an all-carbon crosslinker comprising one double bond
  C-term NH2
LTFAAYWAQLASAM

SEQ ID NO: 6 - protein, 14 aa, Artificial Sequence
  Description of Artificial Sequence: Synthetic peptide
  N-term Ac
  MOD_RES (4)..(4): Alpha-Me R8-octenyl-alanine olefin amino acid connected by an all-carbon crosslinker comprising one double bond
  misc_feature (4)..(11): Crosslink between residues
  MOD_RES (11)..(11): Alpha-Me S5-pentenyl-alanine olefin amino acid connected by an all-carbon crosslinker comprising one double bond
  MOD_RES (14)..(14): hLeu
  C-term NH2
LTFAAYWAQLASAL

SEQ ID NO: 7 - protein, 14 aa, Artificial Sequence
  Description of Artificial Sequence: Synthetic peptide
  N-term Ac
  MOD_RES (4)..(4): Alpha-Me R8-octenyl-alanine olefin amino acid connected by an all-carbon crosslinker comprising one double bond
  misc_feature (4)..(11): Crosslink between residues
  MOD_RES (11)..(11): Alpha-Me S5-pentenyl-alanine olefin amino acid connected by an all-carbon crosslinker comprising one double bond
  C-term NH2
LTFAAYWAQLASAF

SEQ ID NO: 8 - protein, 14 aa, Artificial Sequence
  Description of Artificial Sequence: Synthetic peptide
  N-term Ac
  MOD_RES (4)..(4): Alpha-Me R8-octenyl-alanine olefin amino acid connected by an all-carbon crosslinker comprising one double bond
  misc_feature (4)..(11): Crosslink between residues
  MOD_RES (11)..(11): Alpha-Me S5-pentenyl-alanine olefin amino acid connected by an all-carbon crosslinker comprising one double bond
  C-term NH2
LTFAAYWAQLASAI

SEQ ID NO: 9 - protein, 14 aa, Artificial Sequence
  Description of Artificial Sequence: Synthetic peptide
  N-term Ac
  MOD_RES (4)..(4): Alpha-Me R8-octenyl-alanine olefin amino acid connected by an all-carbon crosslinker comprising one double bond
  misc_feature (4)..(11): Crosslink between residues
  MOD_RES (11)..(11): Alpha-Me S5-pentenyl-alanine olefin amino acid connected by an all-carbon crosslinker comprising one double bond
  MOD_RES (14)..(14): Cyclohexyl-Gly
  C-term NH2
LTFAAYWAQLASAG

SEQ ID NO: 10 - protein, 14 aa, Artificial Sequence
  Description of Artificial Sequence: Synthetic peptide
  N-term Ac
  MOD_RES (4)..(4): Alpha-Me R8-octenyl-alanine olefin amino acid connected by an all-carbon crosslinker comprising one double bond
  misc_feature (4)..(11): Crosslink between residues
  MOD_RES (11)..(11): Alpha-Me S5-pentenyl-alanine olefin amino acid connected by an all-carbon crosslinker comprising one double bond
  MOD_RES (14)..(14): 2-aminoisobutyric acid
  C-term NH2
LTFAAYWAQLASAX

SEQ ID NO: 11 - protein, 14 aa, Artificial Sequence
  Description of Artificial Sequence: Synthetic peptide
  N-term Ac
  MOD_RES (4)..(4): Alpha-Me R8-octenyl-alanine olefin amino acid connected by an all-carbon crosslinker comprising one double bond
  misc_feature (4)..(11): Crosslink between residues
  MOD_RES (11)..(11): Alpha-Me S5-pentenyl-alanine olefin amino acid connected by an all-carbon crosslinker comprising one double bond
  C-term NH2
LTFAAYWAQLASAA

SEQ ID NO: 12 - protein, 14 aa, Artificial Sequence
  Description of Artificial Sequence: Synthetic peptide
  N-term Ac
  MOD_RES (4)..(4): Alpha-Me R8-octenyl-alanine olefin amino acid connected by an all-carbon crosslinker comprising one double bond
  misc_feature (4)..(9): Crosslink between residues
  MOD_RES (9)..(9): Alpha-Me S5-pentenyl-alanine olefin amino acid connected by an all-carbon crosslinker comprising one double bond
  MOD_RES (11)..(11): Alpha-Me S5-pentenyl-alanine olefin amino acid connected by an all-carbon crosslinker comprising one double bond
  misc_feature (11)..(13): Crosslink between residues
  MOD_RES (13)..(13): Alpha-Me S5-pentenyl-alanine olefin amino acid connected by an all-carbon crosslinker comprising one double bond
  MOD_RES (14)..(14): Norleucine
  C-term NH2
LTFAAYWAALASAL

SEQ ID NO: 13 - protein, 14 aa, Artificial Sequence
  Description of Artificial Sequence: Synthetic peptide
  N-term Ac
  MOD_RES (4)..(4): Alpha-Me R8-octenyl-alanine olefin amino acid connected by an all-carbon crosslinker comprising one double bond
  misc_feature (4)..(9): Crosslink between residues
  MOD_RES (9)..(9): Alpha-Me S5-pentenyl-alanine olefin amino acid connected by an all-carbon crosslinker comprising one double bond
  MOD_RES (11)..(11): Alpha-Me S5-pentenyl-alanine olefin amino acid connected by an all-carbon crosslinker comprising one double bond
  misc_feature (11)..(13): Crosslink between residues
  MOD_RES (13)..(13): Alpha-Me S5-pentenyl-alanine olefin amino acid connected by an all-carbon crosslinker comprising one double bond
  C-term NH2
LTFAAYWAALASAA

SEQ ID NO: 14 - protein, 12 aa, Artificial Sequence
  Description of Artificial Sequence: Synthetic peptide
  N-term Ac
  MOD_RES (2)..(2): Alpha-Me R8-octenyl-alanine olefin amino acid connected by an all-carbon crosslinker comprising one double bond
  misc_feature (2)..(9): Crosslink between residues
  MOD_RES (7)..(7): Ac3c
  MOD_RES (9)..(9): Alpha-Me S5-pentenyl-alanine olefin amino acid connected by an all-carbon crosslinker comprising one double bond
  MOD_RES (12)..(12): Norleucine
  C-term NH2
FAAYWEXLAAAL

SEQ ID NO: 15 - protein, 12 aa, Artificial Sequence
  Description of Artificial Sequence: Synthetic peptide
  N-term Ac
  MOD_RES (2)..(2): Alpha-Me R8-octenyl-alanine olefin amino acid connected by an all-carbon crosslinker comprising one double bond
  misc_feature (2)..(9): Crosslink between residues
  MOD_RES (7)..(7): Ac3c
  MOD_RES (9)..(9): Alpha-Me S5-pentenyl-alanine olefin amino acid connected by an all-carbon crosslinker comprising one double bond
  C-term NH2
FAAYWEXLAAAL

SEQ ID NO: 16 - protein, 12 aa, Artificial Sequence
  Description of Artificial Sequence: Synthetic peptide
  N-term Ac
  MOD_RES (2)..(2): Alpha-Me R8-octenyl-alanine olefin amino acid connected by an all-carbon crosslinker comprising one double bond
  misc_feature (2)..(9): Crosslink between residues
  MOD_RES (7)..(7): Ac3c
  MOD_RES (9)..(9): Alpha-Me S5-pentenyl-alanine olefin amino acid connected by an all-carbon crosslinker comprising one double bond
  C-term NH2
FAAYWEXLAAAM

SEQ ID NO: 17 - protein, 12 aa, Artificial Sequence
  Description of Artificial Sequence: Synthetic peptide
  N-term Ac
  MOD_RES (2)..(2): Alpha-Me R8-octenyl-alanine olefin amino acid connected by an all-carbon crosslinker comprising one double bond
  misc_feature (2)..(9): Crosslink between residues
  MOD_RES (7)..(7): Ac3c
  MOD_RES (9)..(9): Alpha-Me S5-pentenyl-alanine olefin amino acid connected by an all-carbon crosslinker comprising one double bond
  MOD_RES (12)..(12): hLeu
  C-term NH2
FAAYWEXLAAAL

SEQ ID NO: 18 - protein, 12 aa, Artificial Sequence
  Description of Artificial Sequence: Synthetic peptide
  N-term Ac
  MOD_RES (2)..(2): Alpha-Me R8-octenyl-alanine olefin amino acid connected by an all-carbon crosslinker comprising one double bond
  misc_feature (2)..(9): Crosslink between residues
  MOD_RES (7)..(7): Ac3c
  MOD_RES (9)..(9): Alpha-Me S5-pentenyl-alanine olefin amino acid connected by an all-carbon crosslinker comprising one double bond
  C-term NH2
FAAYWEXLAAAF

SEQ ID NO: 19 - protein, 12 aa, Artificial Sequence
  Description of Artificial Sequence: Synthetic peptide
  N-term Ac
  MOD_RES (2)..(2): Alpha-Me R8-octenyl-alanine olefin amino acid connected by an all-carbon crosslinker comprising one double bond
  misc_feature (2)..(9): Crosslink between residues
  MOD_RES (7)..(7): Ac3c
  MOD_RES (9)..(9): Alpha-Me S5-pentenyl-alanine olefin amino acid connected by an all-carbon crosslinker comprising one double bond
  C-term NH2
FAAYWEXLAAAI

SEQ ID NO: 20 - protein, 12 aa, Artificial Sequence
  Description of Artificial Sequence: Synthetic peptide
  N-term Ac
  MOD_RES (2)..(2): Alpha-Me R8-octenyl-alanine olefin amino acid connected by an all-carbon crosslinker comprising one double bond
  misc_feature (2)..(9): Crosslink between residues
  MOD_RES (7)..(7): Ac3c
  MOD_RES (9)..(9): Alpha-Me S5-pentenyl-alanine olefin amino acid connected by an all-carbon crosslinker comprising one double bond
  MOD_RES (12)..(12): Cyclohexyl-Gly
  C-term NH2
FAAYWEXLAAAG

SEQ ID NO: 21 - protein, 12 aa, Artificial Sequence
  Description of Artificial Sequence: Synthetic peptide
  N-term Ac
  MOD_RES (2)..(2): Alpha-Me R8-octenyl-alanine olefin amino acid connected by an all-carbon crosslinker comprising one double bond
  misc_feature (2)..(9): Crosslink between residues
  MOD_RES (7)..(7): Ac3c
  MOD_RES (9)..(9): Alpha-Me S5-pentenyl-alanine olefin amino acid connected by an all-carbon crosslinker comprising one double bond
  MOD_RES (12)..(12): Cyclohexyl-Ala
  C-term NH2
FAAYWEXLAAAA

SEQ ID NO: 22 - protein, 12 aa, Artificial Sequence
  Description of Artificial Sequence: Synthetic peptide
  N-term Ac
  MOD_RES (2)..(2): Alpha-Me R8-octenyl-alanine olefin amino acid connected by an all-carbon crosslinker comprising one double bond
  misc_feature (2)..(9): Crosslink between residues
  MOD_RES (7)..(7): Ac3c
  MOD_RES (9)..(9): Alpha-Me S5-pentenyl-alanine olefin amino acid connected by an all-carbon crosslinker comprising one double bond
  MOD_RES (12)..(12): 2-aminoisobutyric acid
  C-term NH2
FAAYWEXLAAAX

SEQ ID NO: 23 - protein, 15 aa, Artificial Sequence
  Description of Artificial Sequence: Synthetic peptide
  N-term Ac
  MOD_RES (4)..(4): Alpha-Me R8-octenyl-alanine olefin amino acid connected by an all-carbon crosslinker comprising one double bond
  misc_feature (4)..(11): Crosslink between residues
  MOD_RES (11)..(11): Alpha-Me S5-pentenyl-alanine olefin amino acid connected by an all-carbon crosslinker comprising one double bond
  MOD_RES (14)..(14): 2-aminoisobutyric acid
  C-term NH2
LTFAAYWAQLAAAXV

SEQ ID NO: 24 - protein, 15 aa, Artificial Sequence
  Description of Artificial Sequence: Synthetic peptide
  N-term Ac
  MOD_RES (4)..(4): Alpha-Me R8-octenyl-alanine olefin amino acid connected by an all-carbon crosslinker comprising one double bond
  misc_feature (4)..(11): Crosslink between residues
  MOD_RES (11)..(11): Alpha-Me S5-pentenyl-alanine olefin amino acid connected by an all-carbon crosslinker comprising one double bond
  MOD_RES (14)..(14): 2-aminoisobutyric acid
  C-term NH2
LTFAAYWAQLAAAXV

SEQ ID NO: 25 - protein, 15 aa, Artificial Sequence
  Description of Artificial Sequence: Synthetic peptide
  N-term Ac
  MOD_RES (4)..(4): Alpha-Me R8-octenyl-alanine olefin amino acid connected by an all-carbon crosslinker comprising one double bond
  misc_feature (4)..(11): Crosslink between residues
  MOD_RES (11)..(11): Alpha-Me S5-pentenyl-alanine olefin amino acid connected by an all-carbon crosslinker comprising one double bond
  MOD_RES (13)..(13): 2-aminoisobutyric acid
  C-term NH2
LTFAAYWAQLASXAA

SEQ ID NO: 26 - protein, 15 aa, Artificial Sequence
  Description of Artificial Sequence: Synthetic peptide
  N-term Ac
  MOD_RES (4)..(4): Alpha-Me R8-octenyl-alanine olefin amino acid connected by an all-carbon crosslinker comprising one double bond
  misc_feature (4)..(11): Crosslink between residues
  MOD_RES (11)..(11): Alpha-Me S5-pentenyl-alanine olefin amino acid connected by an all-carbon crosslinker comprising one double bond
  MOD_RES (13)..(13): 2-aminoisobutyric acid
  C-term NH2
LTFAAYWAQLASXAA

SEQ ID NO: 27 - protein, 16 aa, Artificial Sequence
  Description of Artificial Sequence: Synthetic peptide
  N-term Ac
  MOD_RES (5)..(5): Alpha-Me R8-octenyl-alanine olefin amino acid connected by an all-carbon crosslinker comprising one double bond
  misc_feature (5)..(12): Crosslink between residues
  MOD_RES (12)..(12): Alpha-Me S5-pentenyl-alanine olefin amino acid connected by an all-carbon crosslinker comprising one double bond
  MOD_RES (15)..(16): Norleucine
  C-term NH2
HLTFAHHWHQLAAALL

SEQ ID NO: 28 - protein, 16 aa, Artificial Sequence
  Description of Artificial Sequence: Synthetic peptide
  N-term Ac
  MOD_RES (5)..(5): Alpha-Me R8-octenyl-alanine olefin amino acid connected by an all-carbon crosslinker comprising one double bond
  misc_feature (5)..(12): Crosslink between residues
  MOD_RES (12)..(12): Alpha-Me S5-pentenyl-alanine olefin amino acid connected by an all-carbon crosslinker comprising one double bond
  C-term NH2
DLTFAHHWHQLARRLV

SEQ ID NO: 29 - protein, 16 aa, Artificial Sequence
  Description of Artificial Sequence: Synthetic peptide
  N-term Ac
  MOD_RES (5)..(5): Alpha-Me R8-octenyl-alanine olefin amino acid connected by an all-carbon crosslinker comprising one double bond
  misc_feature (5)..(12): Crosslink between residues
  MOD_RES (12)..(12): Alpha-Me S5-pentenyl-alanine olefin amino acid connected by an all-carbon crosslinker comprising one double bond
  C-term NH2
HHTFAHHWHQLAAAML

SEQ ID NO: 30 - protein, 13 aa, Artificial Sequence
  Description of Artificial Sequence: Synthetic peptide
  N-term Ac
  MOD_RES (2)..(2): Alpha-Me R8-octenyl-alanine olefin amino acid connected by an all-carbon crosslinker comprising one double bond
  misc_feature (2)..(9): Crosslink between residues
  MOD_RES (9)..(9): Alpha-Me S5-pentenyl-alanine olefin amino acid connected by an all-carbon crosslinker comprising one double bond
  MOD_RES (13)..(13): Cyclohexyl-Ala
  C-term NH2
FAHHWHQLARRDA

SEQ ID NO: 31 - protein, 13 aa, Artificial Sequence
  Description of Artificial Sequence: Synthetic peptide
  N-term Ac
  MOD_RES (2)..(2): Alpha-Me R8-octenyl-alanine olefin amino acid connected by an all-carbon crosslinker comprising one double bond
  misc_feature (2)..(9): Crosslink between residues
  MOD_RES (9)..(9): Alpha-Me S5-pentenyl-alanine olefin amino acid connected by an all-carbon crosslinker comprising one double bond
  C-term NH2
FAHHWHQLAHRFV

SEQ ID NO: 32 - protein, 16 aa, Artificial Sequence
  Description of Artificial Sequence: Synthetic peptide
  N-term Ac
  MOD_RES (5)..(5): Alpha-Me R8-octenyl-alanine olefin amino acid connected by an all-carbon crosslinker comprising one double bond
  misc_feature (5)..(12): Crosslink between residues
  MOD_RES (12)..(12): Alpha-Me S5-pentenyl-alanine olefin amino acid connected by an all-carbon crosslinker comprising one double bond
  MOD_RES (15)..(15): hLeu
  C-term NH2
HLTFAHHWHQLAAALA

SEQ ID NO: 33 - protein, 16 aa, Artificial Sequence
  Description of Artificial Sequence: Synthetic peptide
  N-term Ac
  MOD_RES (5)..(5): Alpha-Me R8-octenyl-alanine olefin amino acid connected by an all-carbon crosslinker comprising one double bond
  misc_feature (5)..(12): Crosslink between residues
  MOD_RES (12)..(12): Alpha-Me S5-pentenyl-alanine olefin amino acid connected by an all-carbon crosslinker comprising one double bond
  MOD_RES (15)..(15): Cyclohexyl-Gly
  MOD_RES (16)..(16): D-amino acid
  C-term NH2
DLTFAHHWHQLARRGL

SEQ ID NO: 34 - protein, 16 aa, Artificial Sequence
  Description of Artificial Sequence: Synthetic peptide
  N-term Ac
  MOD_RES (5)..(5): Alpha-Me R8-octenyl-alanine olefin amino acid connected by an all-carbon crosslinker comprising one double bond
  misc_feature (5)..(12): Crosslink between residues
  MOD_RES (12)..(12): Alpha-Me S5-pentenyl-alanine olefin amino acid connected by an all-carbon crosslinker comprising one double bond
  MOD_RES (15)..(15): Cyclohexyl-Gly
  MOD_RES (16)..(16): D-amino acid
  C-term NH2
DLTFAHHWHQLARRGL

SEQ ID NO: 35 - protein, 16 aa, Artificial Sequence
  Description of Artificial Sequence: Synthetic peptide
  N-term Ac
  MOD_RES (5)..(5): Alpha-Me R8-octenyl-alanine olefin amino acid connected by an all-carbon crosslinker comprising one double bond
  misc_feature (5)..(12): Crosslink between residues
  MOD_RES (12)..(12): Alpha-Me S5-pentenyl-alanine olefin amino acid connected by an all-carbon crosslinker comprising one double bond
  MOD_RES (15)..(15): Cyclohexyl-Ala
  MOD_RES (16)..(16): D-amino acid
  C-term NH2
HHTFAHHWHQLAAAAV

SEQ ID NO: 36 - protein, 13 aa, Artificial Sequence
  Description of Artificial Sequence: Synthetic peptide
  N-term Ac
  MOD_RES (2)..(2): Alpha-Me R8-octenyl-alanine olefin amino acid connected by an all-carbon crosslinker comprising one double bond
  misc_feature (2)..(9): Crosslink between residues
  MOD_RES (9)..(9): Alpha-Me S5-pentenyl-alanine olefin amino acid connected by an all-carbon crosslinker comprising one double bond
  MOD_RES (13)..(13): D-amino acid
  C-term NH2
FAHHWHQLARRDA

SEQ ID NO: 37 - protein, 13 aa, Artificial Sequence
  Description of Artificial Sequence: Synthetic peptide
  N-term Ac
  MOD_RES (2)..(2): Alpha-Me R8-octenyl-alanine olefin amino acid connected by an all-carbon crosslinker comprising one double bond
  misc_feature (2)..(9): Crosslink between residues
  MOD_RES (9)..(9): Alpha-Me S5-pentenyl-alanine olefin amino acid connected by an all-carbon crosslinker comprising one double bond
  MOD_RES (12)..(12): 2-aminoisobutyric acid
  C-term NH2
FAHHWHQLAHRXG

SEQ ID NO: 38 - protein, 13 aa, Artificial Sequence
  Description of Artificial Sequence: Synthetic peptide
  N-term Ac
  MOD_RES (2)..(2): Alpha-Me R8-octenyl-alanine olefin amino acid connected by an all-carbon crosslinker comprising one double bond
  misc_feature (2)..(9): Crosslink between residues
  MOD_RES (9)..(9): Alpha-Me S5-pentenyl-alanine olefin amino acid connected by an all-carbon crosslinker comprising one double bond
  MOD_RES (12)..(12): Norleucine
  C-term NH2
FAAYWAQLAHHLL

SEQ ID NO: 39 - protein, 13 aa, Artificial Sequence
  Description of Artificial Sequence: Synthetic peptide
  N-term Ac
  MOD_RES (2)..(2): Alpha-Me R8-octenyl-alanine olefin amino acid connected by an all-carbon crosslinker comprising one double bond
  misc_feature (2)..(9): Crosslink between residues
  MOD_RES (9)..(9): Alpha-Me S5-pentenyl-alanine olefin amino acid connected by an all-carbon crosslinker comprising one double bond
  MOD_RES (13)..(13): Norleucine
  C-term NH2
FAAYWSALAHQAL

SEQ ID NO: 40 - protein, 13 aa, Artificial Sequence
  Description of Artificial Sequence: Synthetic peptide
  N-term Ac
  MOD_RES (2)..(2): Alpha-Me R8-octenyl-alanine olefin amino acid connected by an all-carbon crosslinker comprising one double bond
  misc_feature (2)..(9): Crosslink between residues
  MOD_RES (9)..(9): Alpha-Me S5-pentenyl-alanine olefin amino acid connected by an all-carbon crosslinker comprising one double bond
  MOD_RES (12)..(12): Cyclohexyl-Gly
  MOD_RES (13)..(13): D-amino acid
  C-term NH2
FAAYWVQLAQHGL

SEQ ID NO: 41 - protein, 13 aa, Artificial Sequence
  Description of Artificial Sequence: Synthetic peptide
  N-term Ac
  MOD_RES (2)..(2): Alpha-Me R8-octenyl-alanine olefin amino acid connected by an all-carbon crosslinker comprising one double bond
  misc_feature (2)..(9): Crosslink between residues
  MOD_RES (9)..(9): Alpha-Me S5-pentenyl-alanine olefin amino acid connected by an all-carbon crosslinker comprising one double bond
  MOD_RES (12)..(12): Norleucine
  MOD_RES (13)..(13): D-amino acid
  C-term NH2
FAAYWTALAQQLV

SEQ ID NO: 42 - protein, 13 aa, Artificial Sequence
  Description of Artificial Sequence: Synthetic peptide
  N-term Ac
  MOD_RES (2)..(2): Alpha-Me R8-octenyl-alanine olefin amino acid connected by an all-carbon crosslinker comprising one double bond
  misc_feature (2)..(9): Crosslink between residues
  MOD_RES (9)..(9): Alpha-Me S5-pentenyl-alanine olefin amino acid connected by an all-carbon crosslinker comprising one double bond
  MOD_RES (11)..(11): 2-aminoisobutyric acid
  MOD_RES (13)..(13): D-amino acid
  C-term NH2
FAAYWYQLAHXAA

SEQ ID NO: 43 - protein, 15 aa, Artificial Sequence
  Description of Artificial Sequence: Synthetic peptide
  N-term Ac
  MOD_RES (4)..(4): Alpha-Me R8-octenyl-alanine olefin amino acid connected by an all-carbon crosslinker comprising one double bond
  misc_feature (4)..(11): Crosslink between residues
  MOD_RES (11)..(11): Alpha-Me S5-pentenyl-alanine olefin amino acid connected by an all-carbon crosslinker comprising one double bond
  MOD_RES (15)..(15): D-amino acid
  C-term NH2
LTFAAYWAQLAHHLA

SEQ ID NO: 44 - protein, 15 aa, Artificial Sequence
  Description of Artificial Sequence: Synthetic peptide
  N-term Ac
  MOD_RES (4)..(4): Alpha-Me R8-octenyl-alanine olefin amino acid connected by an all-carbon crosslinker comprising one double bond
  misc_feature (4)..(11): Crosslink between residues
  MOD_RES (11)..(11): Alpha-Me S5-pentenyl-alanine olefin amino acid connected by an all-carbon crosslinker comprising one double bond
  MOD_RES (15)..(15): D-amino acid
  C-term NH2
LTFAAYWAQLAHHLA

SEQ ID NO: 45 - protein, 15 aa, Artificial Sequence
  Description of Artificial Sequence: Synthetic peptide
  N-term Ac
  MOD_RES (4)..(4): Alpha-Me R8-octenyl-alanine olefin amino acid connected by an all-carbon crosslinker comprising one double bond
  misc_feature (4)..(11): Crosslink between residues
  MOD_RES (11)..(11): Alpha-Me S5-pentenyl-alanine olefin amino acid connected by an all-carbon crosslinker comprising one double bond
  MOD_RES (14)..(14): Norleucine
  MOD_RES (15)..(15): D-amino acid
  C-term NH2
LTFAAYWAQLAHQLV

SEQ ID NO: 46 - protein, 15 aa, Artificial Sequence
  Description of Artificial Sequence: Synthetic peptide
  N-term Ac
  MOD_RES (4)..(4): Alpha-Me R8-octenyl-alanine olefin amino acid connected by an all-carbon crosslinker comprising one double bond
  misc_feature (4)..(11): Crosslink between residues
  MOD_RES (11)..(11): Alpha-Me S5-pentenyl-alanine olefin amino acid connected by an all-carbon crosslinker comprising one double bond
  MOD_RES (14)..(14): Norleucine
  MOD_RES (15)..(15): D-amino acid
  C-term NH2
LTFAAYWAQLAHQLV

SEQ ID NO: 47 - protein, 15 aa, Artificial Sequence
  Description of Artificial Sequence: Synthetic peptide
  N-term Ac
  MOD_RES (4)..(4): Alpha-Me R8-octenyl-alanine olefin amino acid connected by an all-carbon crosslinker comprising one double bond
  misc_feature (4)..(11): Crosslink between residues
  MOD_RES (11)..(11): Alpha-Me S5-pentenyl-alanine olefin amino acid connected by an all-carbon crosslinker comprising one double bond
  MOD_RES (15)..(15): D-amino acid
  C-term NH2
LTFAAYWAQLAQQML

SEQ ID NO: 48 - protein, 15 aa, Artificial Sequence
  Description of Artificial Sequence: Synthetic peptide
  N-term Ac
  MOD_RES (4)..(4): Alpha-Me R8-octenyl-alanine olefin amino acid connected by an all-carbon crosslinker comprising one double bond
  misc_feature (4)..(11): Crosslink between residues
  MOD_RES (11)..(11): Alpha-Me S5-pentenyl-alanine olefin amino acid connected by an all-carbon crosslinker comprising one double bond
  MOD_RES (15)..(15): D-amino acid
  C-term NH2
LTFAAYWAQLAQQML

SEQ ID NO: 49 - protein, 15 aa, Artificial Sequence
  Description of Artificial Sequence: Synthetic peptide
  N-term Ac
  MOD_RES (4)..(4): Alpha-Me R8-octenyl-alanine olefin amino acid connected by an all-carbon crosslinker comprising one double bond
  misc_feature (4)..(11): Crosslink between residues
  MOD_RES (11)..(11): Alpha-Me S5-pentenyl-alanine olefin amino acid connected by an all-carbon crosslinker comprising one double bond
  MOD_RES (13)..(13): 2-aminoisobutyric acid
  MOD_RES (14)..(14): hLeu
  C-term NH2
LTFAAYWAQLAHXLV

SEQ ID NO: 50 - protein, 15 aa, Artificial Sequence
  Description of Artificial Sequence: Synthetic peptide
  N-term Ac
  MOD_RES (4)..(4): Alpha-Me R8-octenyl-alanine olefin amino acid connected by an all-carbon crosslinker comprising one double bond
  misc_feature (4)..(11): Crosslink between residues
  MOD_RES (11)..(11): Alpha-Me S5-pentenyl-alanine olefin amino acid connected by an all-carbon crosslinker comprising one double bond
  C-term NH2
LTFAAYWAQLAAHFA

SEQ ID NO: 51 - protein, 16 aa, Artificial Sequence
  Description of Artificial Sequence: Synthetic peptide
  N-term Ac
  MOD_RES (5)..(5): Alpha-Me R8-octenyl-alanine olefin amino acid connected by an all-carbon crosslinker comprising one double bond
  misc_feature (5)..(12): Crosslink between residues
  MOD_RES (12)..(12): Alpha-Me S5-pentenyl-alanine olefin amino acid connected by an all-carbon crosslinker comprising one double bond
  MOD_RES (15)..(15): Norleucine
  MOD_RES (16)..(16): D-amino acid
  C-term NH2
HLTFAHHWHQLAAALL

SEQ ID NO: 52 - protein, 16 aa, Artificial Sequence
  Description of Artificial Sequence: Synthetic peptide
  N-term Ac
  MOD_RES (5)..(5): Alpha-Me R8-octenyl-alanine olefin amino acid connected by an all-carbon crosslinker comprising one double bond
  misc_feature (5)..(12): Crosslink between residues
  MOD_RES (12)..(12): Alpha-Me S5-pentenyl-alanine olefin amino acid connected by an all-carbon crosslinker comprising one double bond
  MOD_RES (16)..(16): D-amino acid
  C-term NH2
DLTFAHHWHQLARRLA

SEQ ID NO: 53 - protein, 16 aa, Artificial Sequence
  Description of Artificial Sequence: Synthetic peptide
  N-term Ac
  MOD_RES (5)..(5): Alpha-Me R8-octenyl-alanine olefin amino acid connected by an all-carbon crosslinker comprising one double bond
  misc_feature (5)..(12): Crosslink between residues
  MOD_RES (12)..(12): Alpha-Me S5-pentenyl-alanine olefin amino acid connected by an all-carbon crosslinker comprising one double bond
  MOD_RES (16)..(16): D-amino acid
  C-term NH2
HHTFAHHWHQLAAAMV

SEQ ID NO: 54 - protein, 13 aa, Artificial Sequence
  Description of Artificial Sequence: Synthetic peptide
  N-term Ac
  MOD_RES (2)..(2): Alpha-Me R8-octenyl-alanine olefin amino acid connected by an all-carbon crosslinker comprising one double bond
  misc_feature (2)..(9): Crosslink between residues
  MOD_RES (9)..(9): Alpha-Me S5-pentenyl-alanine olefin amino acid connected by an all-carbon crosslinker comprising one double bond
  C-term NH2
FAHHWHQLARRDA

SEQ ID NO: 55 - protein, 13 aa, Artificial Sequence
  Description of Artificial Sequence: Synthetic peptide
  N-term Ac
  MOD_RES (2)..(2): Alpha-Me R8-octenyl-alanine olefin amino acid connected by an all-carbon crosslinker comprising one double bond
  misc_feature (2)..(9): Crosslink between residues
  MOD_RES (9)..(9): Alpha-Me S5-pentenyl-alanine olefin amino acid connected by an all-carbon crosslinker comprising one double bond
  MOD_RES (13)..(13): Cyclohexyl-Ala
  C-term NH2
FAHHWHQLAHRFA

SEQ ID NO: 56 - protein, 11 aa, Artificial Sequence
  Description of Artificial Sequence: Synthetic peptide
  N-term Ac
  MOD_RES (2)..(2): Alpha-Me R8-octenyl-alanine olefin amino acid connected by an all-carbon crosslinker comprising one double bond
  misc_feature (2)..(9): Crosslink between residues
  MOD_RES (9)..(9): Alpha-Me S5-pentenyl-alanine olefin amino acid connected by an all-carbon crosslinker comprising one double bond
  C-term NHAm
FAAYWEALAAA

SEQ ID NO: 57 - protein, 11 aa, Artificial Sequence
  Description of Artificial Sequence: Synthetic peptide
  N-term Ac
  MOD_RES (2)..(2): Alpha-Me R8-octenyl-alanine olefin amino acid connected by an all-carbon crosslinker comprising one double bond
  misc_feature (2)..(9): Crosslink between residues
  MOD_RES (9)..(9): Alpha-Me S5-pentenyl-alanine olefin amino acid connected by an all-carbon crosslinker comprising one double bond
  C-term NHiAm
FAAYWEALAAA

SEQ ID NO: 58 - protein, 11 aa, Artificial Sequence
  Description of Artificial Sequence: Synthetic peptide
  N-term Ac
  MOD_RES (2)..(2): Alpha-Me R8-octenyl-alanine olefin amino acid connected by an all-carbon crosslinker comprising one double bond
  misc_feature (2)..(9): Crosslink between residues
  MOD_RES (9)..(9): Alpha-Me S5-pentenyl-alanine olefin amino acid connected by an all-carbon crosslinker comprising one double bond
  C-term NHnPr3Ph
FAAYWEALAAA

SEQ ID NO: 59 - protein, 11 aa, Artificial Sequence
  Description of Artificial Sequence: Synthetic peptide
  N-term Ac
  MOD_RES (2)..(2): Alpha-Me R8-octenyl-alanine olefin amino acid connected by an all-carbon crosslinker comprising one double bond
  misc_feature (2)..(9): Crosslink between residues
  MOD_RES (9)..(9): Alpha-Me S5-pentenyl-alanine olefin amino acid connected by an all-carbon crosslinker comprising one double bond
  C-term NHnBu33Me
FAAYWEALAAA

SEQ ID NO: 60 - protein, 11 aa, Artificial Sequence
  Description of Artificial Sequence: Synthetic peptide
  N-term Ac
  MOD_RES (2)..(2): Alpha-Me R8-octenyl-alanine olefin amino acid connected by an all-carbon crosslinker comprising one double bond
  misc_feature (2)..(9): Crosslink between residues
  MOD_RES (9)..(9): Alpha-Me S5-pentenyl-alanine olefin amino acid connected by an all-carbon crosslinker comprising one double bond
  C-term NHnPr
FAAYWEALAAA

SEQ ID NO: 61 - protein, 11 aa, Artificial Sequence
  Description of Artificial Sequence: Synthetic peptide
  N-term Ac
  MOD_RES (2)..(2): Alpha-Me R8-octenyl-alanine olefin amino acid connected by an all-carbon crosslinker comprising one double bond
  misc_feature (2)..(9): Crosslink between residues
  MOD_RES (9)..(9): Alpha-Me S5-pentenyl-alanine olefin amino acid connected by an all-carbon crosslinker comprising one double bond
  C-term NHnEt2Ch
FAAYWEALAAA

SEQ ID NO: 62 - protein, 11 aa, Artificial Sequence
  Description of Artificial Sequence: Synthetic peptide
  N-term Ac
  MOD_RES (2)..(2): Alpha-Me R8-octenyl-alanine olefin amino acid connected by an all-carbon crosslinker comprising one double bond
  misc_feature (2)..(9): Crosslink between residues
  MOD_RES (9)..(9): Alpha-Me S5-pentenyl-alanine olefin amino acid connected by an all-carbon crosslinker comprising one double bond
  C-term NHnEt2Cp
FAAYWEALAAA

SEQ ID NO: 63 - protein, 11 aa, Artificial Sequence
  Description of Artificial Sequence: Synthetic peptide
  N-term Ac
  MOD_RES (2)..(2): Alpha-Me R8-octenyl-alanine olefin amino acid connected by an all-carbon crosslinker comprising one double bond
  misc_feature (2)..(9): Crosslink between residues
  MOD_RES (9)..(9): Alpha-Me S5-pentenyl-alanine olefin amino acid connected by an all-carbon crosslinker comprising one double bond
  C-term NHHex
FAAYWEALAAA

SEQ ID NO: 64 - protein, 15 aa, Artificial Sequence
  Description of Artificial Sequence: Synthetic peptide
  N-term Ac
  MOD_RES (4)..(4): Alpha-Me R8-octenyl-alanine olefin amino acid connected by an all-carbon crosslinker comprising one double bond
  misc_feature (4)..(11): Crosslink between residues
  MOD_RES (11)..(11): Alpha-Me S5-pentenyl-alanine olefin amino acid connected by an all-carbon crosslinker comprising one double bond
  C-term NH2
LTFAAYWAQLAAAIA

SEQ ID NO: 65 - protein, 15 aa, Artificial Sequence
  Description of Artificial Sequence: Synthetic peptide
  N-term Ac
  MOD_RES (4)..(4): Alpha-Me R8-octenyl-alanine olefin amino acid connected by an all-carbon crosslinker comprising one double bond
  misc_feature (4)..(11): Crosslink between residues
  MOD_RES (11)..(11): Alpha-Me S5-pentenyl-alanine olefin amino acid connected by an all-carbon crosslinker comprising one double bond
  C-term NH2
LTFAAYWAQLAAAIA

SEQ ID NO: 66 - protein, 15 aa, Artificial Sequence
  Description of Artificial Sequence: Synthetic peptide
  N-term Ac
  MOD_RES (4)..(4): Alpha-Me R8-octenyl-alanine olefin amino acid connected by an all-carbon crosslinker comprising one double bond
  misc_feature (4)..(11): Crosslink between residues
  MOD_RES (11)..(11): Alpha-Me S5-pentenyl-alanine olefin amino acid connected by an all-carbon crosslinker comprising one double bond
  C-term NH2
LTFAAYWAALAAAMA

SEQ ID NO: 67 - protein, 15 aa, Artificial Sequence
  Description of Artificial Sequence: Synthetic peptide
  N-term Ac
  MOD_RES (4)..(4): Alpha-Me R8-octenyl-alanine olefin amino acid connected by an all-carbon crosslinker comprising one double bond
  misc_feature (4)..(11): Crosslink between residues
  MOD_RES (11)..(11): Alpha-Me S5-pentenyl-alanine olefin amino acid connected by an all-carbon crosslinker comprising one double bond
  C-term NH2
LTFAAYWAALAAAMA

SEQ ID NO: 68 - protein, 15 aa, Artificial Sequence
  Description of Artificial Sequence: Synthetic peptide
  N-term Ac
  MOD_RES (4)..(4): Alpha-Me R8-octenyl-alanine olefin amino acid connected by an all-carbon crosslinker comprising one double bond
  misc_feature (4)..(11): Crosslink between residues
  MOD_RES (11)..(11): Alpha-Me S5-pentenyl-alanine olefin amino acid connected by an all-carbon crosslinker comprising one double bond
  MOD_RES (14)..(14): Norleucine
  C-term NH2
LTFAAYWAQLAAALA

SEQ ID NO: 69 - protein, 15 aa, Artificial Sequence
  Description of Artificial Sequence: Synthetic peptide
  N-term Ac
  MOD_RES (4)..(4): Alpha-Me R8-octenyl-alanine olefin amino acid connected by an all-carbon crosslinker comprising one double bond
  misc_feature (4)..(11): Crosslink between residues
  MOD_RES (11)..(11): Alpha-Me S5-pentenyl-alanine olefin amino acid connected by an all-carbon crosslinker comprising one double bond
  MOD_RES (14)..(14): Norleucine
  C-term NH2
LTFAAYWAQLAAALA

SEQ ID NO: 70 - protein, 15 aa, Artificial Sequence
  Description of Artificial Sequence: Synthetic peptide
  N-term Ac
  MOD_RES (4)..(4): Alpha-Me R8-octenyl-alanine olefin amino acid connected by an all-carbon crosslinker comprising one double bond
  misc_feature (4)..(11): Crosslink between residues
  MOD_RES (11)..(11): Alpha-Me S5-pentenyl-alanine olefin amino acid connected by an all-carbon crosslinker comprising one double bond
  MOD_RES (15)..(15): D-amino acid
  C-term NH2
LTFAAYWAQLAAAIA

SEQ ID NO: 71 - protein, 15 aa, Artificial Sequence
  Description of Artificial Sequence: Synthetic peptide
  N-term Ac
  MOD_RES (4)..(4): Alpha-Me R8-octenyl-alanine olefin amino acid connected by an all-carbon crosslinker comprising one double bond
  misc_feature (4)..(11): Crosslink between residues
  MOD_RES (11)..(11): Alpha-Me S5-pentenyl-alanine olefin amino acid connected by an all-carbon crosslinker comprising one double bond
  MOD_RES (15)..(15): D-amino acid
  C-term NH2
LTFAAYWAQLAAAIA

SEQ ID NO: 72 - protein, 15 aa, Artificial Sequence
  Description of Artificial Sequence: Synthetic peptide
  N-term Ac
  MOD_RES (4)..(4): Alpha-Me R8-octenyl-alanine olefin amino acid connected by an all-carbon crosslinker comprising one double bond
  misc_feature (4)..(11): Crosslink between residues
  MOD_RES (11)..(11): Alpha-Me S5-pentenyl-alanine olefin amino acid connected by an all-carbon crosslinker comprising one double bond
  MOD_RES (15)..(15): D-amino acid
  C-term NH2
LTFAAYWAALAAAMA

SEQ ID NO: 73 - protein, 15 aa, Artificial Sequence
  Description of Artificial Sequence: Synthetic peptide
  N-term Ac
  MOD_RES (4)..(4): Alpha-Me R8-octenyl-alanine olefin amino acid connected by an all-carbon crosslinker comprising one double bond
  misc_feature (4)..(11): Crosslink between residues
  MOD_RES (11)..(11): Alpha-Me S5-pentenyl-alanine olefin amino acid connected by an all-carbon crosslinker comprising one double bond
  MOD_RES (15)..(15): D-amino acid
  C-term NH2
LTFAAYWAALAAAMA

SEQ ID NO: 74 - protein, 15 aa, Artificial Sequence
  Description of Artificial Sequence: Synthetic peptide
  N-term Ac
  MOD_RES (4)..(4): Alpha-Me R8-octenyl-alanine olefin amino acid connected by an all-carbon crosslinker comprising one double bond
  misc_feature (4)..(11): Crosslink between residues
  MOD_RES (11)..(11): Alpha-Me S5-pentenyl-alanine olefin amino acid connected by an all-carbon crosslinker comprising one double bond
  MOD_RES (14)..(14): Norleucine
  MOD_RES (15)..(15): D-amino acid
  C-term NH2
LTFAAYWAQLAAALA

SEQ ID NO: 75 - protein, 15 aa, Artificial Sequence
  Description of Artificial Sequence: Synthetic peptide
  N-term Ac
  MOD_RES (4)..(4): Alpha-Me R8-octenyl-alanine olefin amino acid connected by an all-carbon crosslinker comprising one double bond
  misc_feature (4)..(11): Crosslink between residues
  MOD_RES (11)..(11): Alpha-Me S5-pentenyl-alanine olefin amino acid connected by an all-carbon crosslinker comprising one double bond
  MOD_RES (14)..(14): Norleucine
  MOD_RES (15)..(15): D-amino acid
  C-term NH2
LTFAAYWAQLAAALA

SEQ ID NO: 76 - protein, 15 aa, Artificial Sequence
  Description of Artificial Sequence: Synthetic peptide
  N-term Ac
  MOD_RES (4)..(4): Alpha-Me R8-octenyl-alanine olefin amino acid connected by an all-carbon crosslinker comprising one double bond
  misc_feature (4)..(11): Crosslink between residues
  MOD_RES (11)..(11): Alpha-Me S5-pentenyl-alanine olefin amino acid connected by an all-carbon crosslinker comprising one double bond
  MOD_RES (15)..(15): D-amino acid
  C-term NH2
LTFAAYWAALAAAIV

SEQ ID NO: 77 - protein, 15 aa, Artificial Sequence
  Description of Artificial Sequence: Synthetic peptide
  N-term Ac
  MOD_RES (4)..(4): Alpha-Me R8-octenyl-alanine olefin amino acid connected by an all-carbon crosslinker comprising one double bond
  misc_feature (4)..(11): Crosslink between residues
  MOD_RES (11)..(11): Alpha-Me S5-pentenyl-alanine olefin amino acid connected by an all-carbon crosslinker comprising one double bond
  MOD_RES (15)..(15): D-amino acid
  C-term NH2
LTFAAYWAALAAAIV

SEQ ID NO: 78 - protein, 15 aa, Artificial Sequence
  Description of Artificial Sequence: Synthetic peptide
  N-term Ac
  MOD_RES (4)..(4): Alpha-Me R8-octenyl-alanine olefin amino acid connected by an all-carbon crosslinker comprising one double bond
  misc_feature (4)..(11): Crosslink between residues
  MOD_RES (11)..(11): Alpha-Me S5-pentenyl-alanine olefin amino acid connected by an all-carbon crosslinker comprising one double bond
  MOD_RES (15)..(15): D-amino acid
  C-term NH2
LTFAAYWAQLAAAMV

SEQ ID NO: 79 - protein, 15 aa, Artificial Sequence
  Description of Artificial Sequence: Synthetic peptide
  N-term Ac
  MOD_RES (4)..(4): Alpha-Me R8-octenyl-alanine olefin amino acid connected by an all-carbon crosslinker comprising one double bond
  misc_feature (4)..(11): Crosslink between residues
  MOD_RES (11)..(11): Alpha-Me S5-pentenyl-alanine olefin amino acid connected by an all-carbon crosslinker comprising one double bond
  MOD_RES (14)..(14): Norleucine
  MOD_RES (15)..(15): D-amino acid
  C-term NH2
LTFAAYWAALAAALV

SEQ ID NO: 80 - protein, 15 aa, Artificial Sequence
  Description of Artificial Sequence: Synthetic peptide
  N-term Ac
  MOD_RES (4)..(4): Alpha-Me R8-octenyl-alanine olefin amino acid connected by an all-carbon crosslinker comprising one double bond
  misc_feature (4)..(11): Crosslink between residues
  MOD_RES (11)..(11): Alpha-Me S5-pentenyl-alanine olefin amino acid connected by an all-carbon crosslinker comprising one double bond
  MOD_RES (14)..(14): Norleucine
  MOD_RES (15)..(15): D-amino acid
  C-term NH2
LTFAAYWAALAAALV

SEQ ID NO: 81 - protein, 15 aa, Artificial Sequence
  Description of Artificial Sequence: Synthetic peptide
  N-term Ac
  MOD_RES (4)..(4): Alpha-Me R8-octenyl-alanine olefin amino acid connected by an all-carbon crosslinker comprising one double bond
  misc_feature (4)..(11): Crosslink between residues
  MOD_RES (11)..(11): Alpha-Me S5-pentenyl-alanine olefin amino acid connected by an all-carbon crosslinker comprising one double bond
  MOD_RES (15)..(15): D-amino acid
  C-term NH2
LTFAAYWAQLAAAIL

SEQ ID NO: 82 - protein, 15 aa, Artificial Sequence
  Description of Artificial Sequence: Synthetic peptide
  N-term Ac
  MOD_RES (4)..(4): Alpha-Me R8-octenyl-alanine olefin amino acid connected by an all-carbon crosslinker comprising one double bond
  misc_feature (4)..(11): Crosslink between residues
  MOD_RES (11)..(11): Alpha-Me S5-pentenyl-alanine olefin amino acid connected by an all-carbon crosslinker comprising one double bond
  MOD_RES (15)..(15): D-amino acid
  C-term NH2
LTFAAYWAQLAAAIL

SEQ ID NO: 83 - protein, 15 aa, Artificial Sequence
  Description of Artificial Sequence: Synthetic peptide
  N-term Ac
  MOD_RES (4)..(4): Alpha-Me R8-octenyl-alanine olefin amino acid connected by an all-carbon crosslinker comprising one double bond
  misc_feature (4)..(11): Crosslink between residues
  MOD_RES (11)..(11): Alpha-Me S5-pentenyl-alanine olefin amino acid connected by an all-carbon crosslinker comprising one double bond
  MOD_RES (15)..(15): D-amino acid
  C-term NH2
LTFAAYWAALAAAML

SEQ ID NO: 84 - protein, 15 aa, Artificial Sequence
  Description of Artificial Sequence: Synthetic peptide
  N-term Ac
  MOD_RES (4)..(4): Alpha-Me R8-octenyl-alanine olefin amino acid connected by an all-carbon crosslinker comprising one double bond
  misc_feature (4)..(11): Crosslink between residues
  MOD_RES (11)..(11): Alpha-Me S5-pentenyl-alanine olefin amino acid connected by an all-carbon crosslinker comprising one double bond
  MOD_RES (14)..(14): Norleucine
  MOD_RES (15)..(15): D-amino acid
  C-term NH2
LTFAAYWAQLAAALL

SEQ ID NO: 85 - protein, 15 aa, Artificial Sequence
  Description of Artificial Sequence: Synthetic peptide
  N-term Ac
  MOD_RES (4)..(4): Alpha-Me R8-octenyl-alanine olefin amino acid connected by an all-carbon crosslinker comprising one double bond
  misc_feature (4)..(11): Crosslink between residues
  MOD_RES (11)..(11): Alpha-Me S5-pentenyl-alanine olefin amino acid connected by an all-carbon crosslinker comprising one double bond
  MOD_RES (14)..(14): Norleucine
  MOD_RES (15)..(15): D-amino acid
  C-term NH2
LTFAAYWAQLAAALL

SEQ ID NO: 86 - protein, 13 aa, Artificial Sequence
  Description of Artificial Sequence: Synthetic peptide
  N-term Ac
  MOD_RES (2)..(2): Alpha-Me R8-octenyl-alanine olefin amino acid connected by an all-carbon crosslinker comprising one double bond
  misc_feature (2)..(9): Crosslink between residues
  MOD_RES (9)..(9): Alpha-Me S5-pentenyl-alanine olefin amino acid connected by an all-carbon crosslinker comprising one double bond
  C-term NH2
FAAYWEALAAAMA

SEQ ID NO: 87 - protein, 13 aa, Artificial Sequence
  Description of Artificial Sequence: Synthetic peptide
  N-term Ac
  MOD_RES (2)..(2): Alpha-Me R8-octenyl-alanine olefin amino acid connected by an all-carbon crosslinker comprising one double bond
  misc_feature (2)..(9): Crosslink between residues
  MOD_RES (9)..(9): Alpha-Me S5-pentenyl-alanine olefin amino acid connected by an all-carbon crosslinker comprising one double bond
  MOD_RES (12)..(12): Norleucine
  C-term NH2
FAAYWEALAAALA

SEQ ID NO: 88 - protein, 13 aa, Artificial Sequence
  Description of Artificial Sequence: Synthetic peptide
  N-term Ac
  MOD_RES (2)..(2): Alpha-Me R8-octenyl-alanine olefin amino acid connected by an all-carbon crosslinker comprising one double bond
  misc_feature (2)..(9): Crosslink between residues
  MOD_RES (9)..(9): Alpha-Me S5-pentenyl-alanine olefin amino acid connected by an all-carbon crosslinker comprising one double bond
  MOD_RES (13)..(13): D-amino acid
  C-term NH2
FAAYWEALAAAIA

SEQ ID NO: 89 - protein, 13 aa, Artificial Sequence
  Description of Artificial Sequence: Synthetic peptide
  N-term Ac
  MOD_RES (2)..(2): Alpha-Me R8-octenyl-alanine olefin amino acid connected by an all-carbon crosslinker comprising one double bond
  misc_feature (2)..(9): Crosslink between residues
  MOD_RES (9)..(9): Alpha-Me S5-pentenyl-alanine olefin amino acid connected by an all-carbon crosslinker comprising one double bond
  MOD_RES (13)..(13): D-amino acid
  C-term NH2
FAAYWEALAAAMA

SEQ ID NO: 90 - protein, 13 aa, Artificial Sequence
  Description of Artificial Sequence: Synthetic peptide
  N-term Ac
  MOD_RES (2)..(2): Alpha-Me R8-octenyl-alanine olefin amino acid connected by an all-carbon crosslinker comprising one double bond
  misc_feature (2)..(9): Crosslink between residues
  MOD_RES (9)..(9): Alpha-Me S5-pentenyl-alanine olefin amino acid connected by an all-carbon crosslinker comprising one double bond
  MOD_RES (12)..(12): Norleucine
  MOD_RES (13)..(13): D-amino acid
  C-term NH2
FAAYWEALAAALA

SEQ ID NO: 91 - protein, 13 aa, Artificial Sequence
  Description of Artificial Sequence: Synthetic peptide
  N-term Ac
  MOD_RES (2)..(2): Alpha-Me R8-octenyl-alanine olefin amino acid connected by an all-carbon crosslinker comprising one double bond
  misc_feature (2)..(9): Crosslink between residues
  MOD_RES (9)..(9): Alpha-Me S5-pentenyl-alanine olefin amino acid connected by an all-carbon crosslinker comprising one double bond
  MOD_RES (13)..(13): D-amino acid
  C-term NH2
FAAYWEALAAAIV

SEQ ID NO: 92 - protein, 13 aa, Artificial Sequence
  Description of Artificial Sequence: Synthetic peptide
  N-term Ac
  MOD_RES (2)..(2): Alpha-Me R8-octenyl-alanine olefin amino acid connected by an all-carbon crosslinker comprising one double bond
  misc_feature (2)..(9): Crosslink between residues
  MOD_RES (9)..(9): Alpha-Me S5-pentenyl-alanine olefin amino acid connected by an all-carbon crosslinker comprising one double bond
  MOD_RES (13)..(13): D-amino acid
  C-term NH2
FAAYWEALAAAMV

SEQ ID NO: 93 - protein, 13 aa, Artificial Sequence
  Description of Artificial Sequence: Synthetic peptide
  N-term Ac
  MOD_RES (2)..(2): Alpha-Me R8-octenyl-alanine olefin amino acid connected by an all-carbon crosslinker comprising one double bond
  misc_feature (2)..(9): Crosslink between residues
  MOD_RES (9)..(9): Alpha-Me S5-pentenyl-alanine olefin amino acid connected by an all-carbon crosslinker comprising one double bond
  MOD_RES (12)..(12): Norleucine
  MOD_RES (13)..(13): D-amino acid
  C-term NH2
FAAYWEALAAALV

SEQ ID NO: 94 - protein, 13 aa, Artificial Sequence
  Description of Artificial Sequence: Synthetic peptide
  N-term Ac
  MOD_RES (2)..(2): Alpha-Me R8-octenyl-alanine olefin amino acid connected by an all-carbon crosslinker comprising one double bond
  misc_feature (2)..(9): Crosslink between residues
  MOD_RES (9)..(9): Alpha-Me S5-pentenyl-alanine olefin amino acid connected by an all-carbon crosslinker comprising one double bond
  MOD_RES (13)..(13): D-amino acid
  C-term NH2
FAAYWEALAAAIL

SEQ ID NO: 95 - protein, 13 aa, Artificial Sequence
  Description of Artificial Sequence: Synthetic peptide
  N-term Ac
  MOD_RES (2)..(2): Alpha-Me R8-octenyl-alanine olefin amino acid connected by an all-carbon crosslinker comprising one double bond
  misc_feature (2)..(9): Crosslink between residues
  MOD_RES (9)..(9): Alpha-Me S5-pentenyl-alanine olefin amino acid connected by an all-carbon crosslinker comprising one double bond
  MOD_RES (13)..(13): D-amino acid
  C-term NH2
FAAYWEALAAAML

SEQ ID NO: 96 - protein, 13 aa, Artificial Sequence
  Description of Artificial Sequence: Synthetic peptide
  N-term Ac
  MOD_RES (2)..(2): Alpha-Me R8-octenyl-alanine olefin amino acid connected by an all-carbon crosslinker comprising one double bond
  misc_feature (2)..(9): Crosslink between residues
  MOD_RES (9)..(9): Alpha-Me S5-pentenyl-alanine olefin amino acid connected by an all-carbon crosslinker comprising one double bond
  MOD_RES (12)..(12): Norleucine
  MOD_RES (13)..(13): D-amino acid
  C-term NH2
FAAYWEALAAALL

SEQ ID NO: 97 - protein, 13 aa, Artificial Sequence
  Description of Artificial Sequence: Synthetic peptide
  N-term Ac
  MOD_RES (2)..(2): Alpha-Me R8-octenyl-alanine olefin amino acid connected by an all-carbon crosslinker comprising one double bond
  misc_feature (2)..(9): Crosslink between residues
  MOD_RES (9)..(9): Alpha-Me S5-pentenyl-alanine olefin amino acid connected by an all-carbon crosslinker comprising one double bond
  MOD_RES (12)..(12): Norleucine
  MOD_RES (13)..(13): D-amino acid
  C-term NH2
FAAYWEALAAALL

SEQ ID NO: 98 - protein, 14 aa, Artificial Sequence
  Description of Artificial Sequence: Synthetic peptide
  N-term Ac
  MOD_RES (4)..(4): Alpha-Me R8-octenyl-alanine olefin amino acid connected by an all-carbon crosslinker comprising one double bond
  misc_feature (4)..(11): Crosslink between residues
  MOD_RES (7)..(7): 6cl-Trp
  MOD_RES (11)..(11): Alpha-Me S5-pentenyl-alanine olefin amino acid connected by an all-carbon crosslinker comprising one double bond
  C-term NH2
LTFAAYWAQLASAA

SEQ ID NO: 99 - protein, 14 aa, Artificial Sequence
  Description of Artificial Sequence: Synthetic peptide
  N-term Ac
  MOD_RES (4)..(4): Alpha-Me R8-octenyl-alanine olefin amino acid connected by an all-carbon crosslinker comprising one double bond
  misc_feature (4)..(11): Crosslink between residues
  MOD_RES (7)..(7): 6cl-Trp
  MOD_RES (11)..(11): Alpha-Me S5-pentenyl-alanine olefin amino acid connected by an all-carbon crosslinker comprising one double bond
  C-term NH2
LTFAAYWAQLASAA

SEQ ID NO: 100 - protein, 15 aa, Artificial Sequence
  Description of Artificial Sequence: Synthetic peptide
  N-term Ac
  MOD_RES (4)..(4): Alpha-Me R8-octenyl-alanine olefin amino acid connected by an all-carbon crosslinker comprising one double bond
  misc_feature (4)..(11): Crosslink between residues
  MOD_RES (11)..(11): Alpha-Me S5-pentenyl-alanine olefin amino acid connected by an all-carbon crosslinker comprising one double bond
  MOD_RES (15)..(15): D-amino acid
  C-term NH2
WTFAFYWSQLAAVAA

SEQ ID NO: 101 - protein, 15 aa, Artificial Sequence
  Description of Artificial Sequence: Synthetic peptide
  N-term Ac
  MOD_RES (4)..(4): Alpha-Me R8-octenyl-alanine olefin amino acid connected by an all-carbon crosslinker comprising one double bond
  misc_feature (4)..(11): Crosslink between residues
  MOD_RES (11)..(11): Alpha-Me S5-pentenyl-alanine olefin amino acid connected by an all-carbon crosslinker comprising one double bond
  MOD_RES (15)..(15): D-amino acid
  C-term NH2
WTFAFYWSQLAAVAA

SEQ ID NO: 102 - protein, 14 aa, Artificial Sequence
  Description of Artificial Sequence: Synthetic peptide
  N-term Ac
  MOD_RES (4)..(4): Alpha-Me R8-octenyl-alanine olefin amino acid connected by an all-carbon crosslinker comprising one double bond
  misc_feature (4)..(11): Crosslink between residues
  MOD_RES (11)..(11): Alpha-Me S5-pentenyl-alanine olefin amino acid connected by an all-carbon crosslinker comprising one double bond
  C-term NH2
WTFAVYWSQLAAVA

SEQ ID NO: 103 - protein, 14 aa, Artificial Sequence
  Description of Artificial Sequence: Synthetic peptide
  N-term Ac
  MOD_RES (4)..(4): Alpha-Me R8-octenyl-alanine olefin amino acid connected by an all-carbon crosslinker comprising one double bond
  misc_feature (4)..(11): Crosslink between residues
  MOD_RES (11)..(11): Alpha-Me S5-pentenyl-alanine olefin amino acid connected by an all-carbon crosslinker comprising one double bond
  C-term NH2
WTFAVYWSQLAAVA

SEQ ID NO: 104 - protein, 15 aa, Artificial Sequence
  Description of Artificial Sequence: Synthetic peptide
  N-term Ac
  MOD_RES (4)..(4): Alpha-Me R8-octenyl-alanine olefin amino acid connected by an all-carbon crosslinker comprising one double bond
  misc_feature (4)..(11): Crosslink between residues
  MOD_RES (11)..(11): Alpha-Me S5-pentenyl-alanine olefin amino acid connected by an all-carbon crosslinker comprising one double bond
  MOD_RES (15)..(15): D-amino acid
  C-term NH2
WTFAFYWSQLASAAA

SEQ ID NO: 105 - protein, 15 aa, Artificial Sequence
  Description of Artificial Sequence: Synthetic peptide
  N-term Ac
  MOD_RES (4)..(4): Alpha-Me R8-octenyl-alanine olefin amino acid connected by an all-carbon crosslinker comprising one double bond
  misc_feature (4)..(11): Crosslink between residues
  MOD_RES (11)..(11): Alpha-Me S5-pentenyl-alanine olefin amino acid connected by an all-carbon crosslinker comprising one double bond
  MOD_RES (15)..(15): D-amino acid
  C-term NH2
WTFAFYWSQLASAAA

SEQ ID NO: 106 - protein, 16 aa, Artificial Sequence
  Description of Artificial Sequence: Synthetic peptide
  N-term Ac
  MOD_RES (4)..(4): Alpha-Me R8-octenyl-alanine olefin amino acid connected by an all-carbon crosslinker comprising one double bond
  misc_feature (4)..(11): Crosslink between residues
  MOD_RES (11)..(11): Alpha-Me S5-pentenyl-alanine olefin amino acid connected by an all-carbon crosslinker comprising one double bond
  MOD_RES (15)..(16): D-amino acid
  C-term NH2
WTFAVYWSQLAAVAAA

SEQ ID NO: 107 - protein, 16 aa, Artificial Sequence
  Description of Artificial Sequence: Synthetic peptide
  N-term Ac
  MOD_RES (4)..(4): Alpha-Me R8-octenyl-alanine olefin amino acid connected by an all-carbon crosslinker comprising one double bond
  misc_feature (4)..(11): Crosslink between residues
  MOD_RES (11)..(11): Alpha-Me S5-pentenyl-alanine olefin amino acid connected by an all-carbon crosslinker comprising one double bond
  MOD_RES (15)..(16): D-amino acid
  C-term NH2
WTFAVYWSQLAAVAAA

SEQ ID NO: 108 - protein, 14 aa, Artificial Sequence
  Description of Artificial Sequence: Synthetic peptide
  N-term Ac
  MOD_RES (4)..(4): Alpha-Me R8-octenyl-alanine olefin amino acid connected by an all-carbon crosslinker comprising one double bond
  misc_feature (4)..(11): Crosslink between residues
  MOD_RES (11)..(11): Alpha-Me S5-pentenyl-alanine olefin amino acid connected by an all-carbon crosslinker comprising one double bond
  C-term NH2
LTFAAYWAQLAAVG

SEQ ID NO: 109 - protein, 14 aa, Artificial Sequence
  Description of Artificial Sequence: Synthetic peptide
  N-term Ac
  MOD_RES (4)..(4): Alpha-Me R8-octenyl-alanine olefin amino acid connected by an all-carbon crosslinker comprising one double bond
  misc_feature (4)..(11): Crosslink between residues
  MOD_RES (11)..(11): Alpha-Me S5-pentenyl-alanine olefin amino acid connected by an all-carbon crosslinker comprising one double bond
  C-term NH2
LTFAAYWAQLAAVG

SEQ ID NO: 110 - protein, 14 aa, Artificial Sequence
  Description of Artificial Sequence: Synthetic peptide
  N-term Ac
  MOD_RES (4)..(4): Alpha-Me R8-octenyl-alanine olefin amino acid connected by an all-carbon crosslinker comprising one double bond
  misc_feature (4)..(11): Crosslink between residues
  MOD_RES (11)..(11): Alpha-Me S5-pentenyl-alanine olefin amino acid connected by an all-carbon crosslinker comprising one double bond
  C-term NH2
LTFAAYWAQLAAVQ

SEQ ID NO: 111 - protein, 14 aa, Artificial Sequence
  Description of Artificial Sequence: Synthetic peptide
  N-term Ac
  MOD_RES (4)..(4): Alpha-Me R8-octenyl-alanine olefin amino acid connected by an all-carbon crosslinker comprising one double bond
  misc_feature (4)..(11): Crosslink between residues
  MOD_RES (11)..(11): Alpha-Me S5-pentenyl-alanine olefin amino acid connected by an all-carbon crosslinker comprising one double bond
  C-term NH2
LTFAAYWAQLAAVQ

SEQ ID NO: 112 - protein, 14 aa, Artificial Sequence
  Description of Artificial Sequence: Synthetic peptide
  N-term Ac
  MOD_RES (4)..(4): Alpha-Me R8-octenyl-alanine olefin amino acid connected by an all-carbon crosslinker comprising one double bond
  misc_feature (4)..(11): Crosslink between residues
  MOD_RES (11)..(11): Alpha-Me S5-pentenyl-alanine olefin amino acid connected by an all-carbon crosslinker comprising one double bond
  MOD_RES (14)..(14): D-amino acid
  C-term NH2
LTFAAYWAQLASAA

SEQ ID NO: 113 - protein, 14 aa, Artificial Sequence
  Description of Artificial Sequence: Synthetic peptide
  N-term Ac
  MOD_RES (4)..(4): Alpha-Me R8-octenyl-alanine olefin amino acid connected by an all-carbon crosslinker comprising one double bond
  misc_feature (4)..(11): Crosslink between residues
  MOD_RES (11)..(11): Alpha-Me S5-pentenyl-alanine olefin amino acid connected by an all-carbon crosslinker comprising one double bond
  MOD_RES (14)..(14): D-amino acid
  C-term NH2
LTFAAYWAQLASAA

SEQ ID NO: 114 - protein, 14 aa, Artificial Sequence
  Description of Artificial Sequence: Synthetic peptide
  N-term Ac
  MOD_RES (4)..(4): Alpha-Me R8-octenyl-alanine olefin amino acid connected by an all-carbon crosslinker comprising one double bond
  misc_feature (4)..(11): Crosslink between residues
  MOD_RES (10)..(10): hLeu
  MOD_RES (11)..(11): Alpha-Me S5-pentenyl-alanine olefin amino acid connected by an all-carbon crosslinker comprising one double bond
  C-term NH2
LTFAAYWAQLASAA

SEQ ID NO: 115 - protein, 14 aa, Artificial Sequence
  Description of Artificial Sequence: Synthetic peptide
  N-term Ac
  MOD_RES (4)..(4): Alpha-Me R8-octenyl-alanine olefin amino acid connected by an all-carbon crosslinker comprising one double bond
  misc_feature (4)..(11): Crosslink between residues
  MOD_RES (10)..(10): hLeu
  MOD_RES (11)..(11): Alpha-Me S5-pentenyl-alanine olefin amino acid connected by an all-carbon crosslinker comprising one double bond
  C-term NH2
LTFAAYWAQLASAA

SEQ ID NO: 116 - protein, 14 aa, Artificial Sequence
  Description of Artificial Sequence: Synthetic peptide
  N-term Ac
  MOD_RES (4)..(4): Alpha-Me R8-octenyl-alanine olefin amino acid connected by an all-carbon crosslinker comprising one double bond
  misc_feature (4)..(11): Crosslink between residues
  MOD_RES (11)..(11): Two pentenyl-alanine olefin side chains, each of which is crosslinked to another amino acid as indicated
  misc_feature (11)..(14): Crosslink between residues
  MOD_RES (14)..(14): Alpha-Me S5-pentenyl-alanine olefin amino acid connected by an all-carbon crosslinker comprising one double bond
  C-term NH2
LTFAAYWEQLASAA

SEQ ID NO: 117 - protein, 14 aa, Artificial Sequence
  Description of Artificial Sequence: Synthetic peptide
  N-term Ac
  MOD_RES (4)..(4): Alpha-Me R8-octenyl-alanine olefin amino acid connected by an all-carbon crosslinker comprising one double bond
  misc_feature (4)..(11): Crosslink between residues
  MOD_RES (11)..(11): Alpha-Me S5-pentenyl-alanine olefin amino acid connected by an all-carbon crosslinker comprising one double bond
  C-term NH2
LTFAAYWAQLASLA

SEQ ID NO: 118 - protein, 14 aa, Artificial Sequence
  Description of Artificial Sequence: Synthetic peptide
  N-term Ac
  MOD_RES (4)..(4): Alpha-Me R8-octenyl-alanine olefin amino acid connected by an all-carbon crosslinker comprising one double bond
  misc_feature (4)..(11): Crosslink between residues
  MOD_RES (11)..(11): Alpha-Me S5-pentenyl-alanine olefin amino acid connected by an all-carbon crosslinker comprising one double bond
  C-term NH2
LTFAAYWAQLASLA

SEQ ID NO: 119 - protein, 14 aa, Artificial Sequence
  Description of Artificial Sequence: Synthetic peptide
  N-term Ac
  MOD_RES (4)..(4): Alpha-Me R8-octenyl-alanine olefin amino acid connected by an all-carbon crosslinker comprising one double bond
  misc_feature (4)..(11): Crosslink between residues
  MOD_RES (11)..(11): Alpha-Me S5-pentenyl-alanine olefin amino acid connected by an all-carbon crosslinker comprising one double bond
  C-term NH2
LTFAAYWAQLASWA

SEQ ID NO: 120 - protein, 14 aa, Artificial Sequence
  Description of Artificial Sequence: Synthetic peptide
  N-term Ac
  MOD_RES (4)..(4): Alpha-Me R8-octenyl-alanine olefin amino acid connected by an all-carbon crosslinker comprising one double bond
  misc_feature (4)..(11): Crosslink between residues
  MOD_RES (11)..(11): Alpha-Me S5-pentenyl-alanine olefin amino acid connected by an all-carbon crosslinker comprising one double bond
  C-term NH2
LTFAAYWAQLASWA

SEQ ID NO: 121 - protein, 14 aa, Artificial Sequence
  Description of Artificial Sequence: Synthetic peptide
  N-term Ac
  MOD_RES (4)..(4): Alpha-Me R8-octenyl-alanine olefin amino acid connected by an all-carbon crosslinker comprising one double bond
  misc_feature (4)..(11): Crosslink between residues
  MOD_RES (11)..(11): Alpha-Me S5-pentenyl-alanine olefin amino acid connected by an all-carbon crosslinker comprising one double bond
  C-term NH2
LTFAAYWAQLASVS

SEQ ID NO: 122 - protein, 14 aa, Artificial Sequence
  Description of Artificial Sequence: Synthetic peptide
  N-term Ac
  MOD_RES (4)..(4): Alpha-Me R8-octenyl-alanine olefin amino acid connected by an all-carbon crosslinker comprising one double bond
  misc_feature (4)..(11): Crosslink between residues
  MOD_RES (11)..(11): Alpha-Me S5-pentenyl-alanine olefin amino acid connected by an all-carbon crosslinker comprising one double bond
  C-term NH2
LTFAAYWAQLASAS

SEQ ID NO: 123 - protein, 14 aa, Artificial Sequence
  Description of Artificial Sequence: Synthetic peptide
  N-term Ac
  MOD_RES (4)..(4): Alpha-Me R8-octenyl-alanine olefin amino acid connected by an all-carbon crosslinker comprising one double bond
  misc_feature (4)..(11): Crosslink between residues
  MOD_RES (11)..(11): Alpha-Me S5-pentenyl-alanine olefin amino acid connected by an all-carbon crosslinker comprising one double bond
  C-term NH2
LTFAAYWAQLASVG

SEQ ID NO: 124 - protein, 14 aa, Artificial Sequence
  Description of Artificial Sequence: Synthetic peptide
  N-term Ac
  MOD_RES (4)..(4): Alpha-Me R8-octenyl-alanine olefin amino acid connected by an all-carbon crosslinker comprising one double bond
  misc_feature (4)..(11): Crosslink between residues
  MOD_RES (11)..(11): Alpha-Me S5-pentenyl-alanine olefin amino acid connected by an all-carbon crosslinker comprising one double bond
  MOD_RES (14)..(14): D-amino acid
  C-term NH2
ETFAVYWAQLASAA

SEQ ID NO: 125 - protein, 14 aa, Artificial Sequence
  Description of Artificial Sequence: Synthetic peptide
  N-term Ac
  MOD_RES (4)..(4): Alpha-Me R8-octenyl-alanine olefin amino acid connected by an all-carbon crosslinker comprising one double bond
  misc_feature (4)..(11): Crosslink between residues
  MOD_RES (11)..(11): Alpha-Me S5-pentenyl-alanine olefin amino acid connected by an all-carbon crosslinker comprising one double bond
  C-term NH2
ETFAVYWAQLASAA

SEQ ID NO: 126 - protein, 14 aa, Artificial Sequence
  Description of Artificial Sequence: Synthetic peptide
  N-term Ac
  MOD_RES (4)..(4): Alpha-Me R8-octenyl-alanine olefin amino acid connected by an all-carbon crosslinker comprising one double bond
  misc_feature (4)..(11): Crosslink between residues
  MOD_RES (11)..(11): Alpha-Me S5-pentenyl-alanine olefin amino acid connected by an all-carbon crosslinker comprising one double bond
  C-term NH2
ETFAVYWAQLASVA

SEQ ID NO: 127 - protein, 14 aa, Artificial Sequence
  Description of Artificial Sequence: Synthetic peptide
  N-term Ac
  MOD_RES (4)..(4): Alpha-Me R8-octenyl-alanine olefin amino acid connected by an all-carbon crosslinker comprising one double bond
  misc_feature (4)..(11): Crosslink between residues
  MOD_RES (11)..(11): Alpha-Me S5-pentenyl-alanine olefin amino acid connected by an all-carbon crosslinker comprising one double bond
  C-term NH2
ETFAVYWAQLASLA

SEQ ID NO: 128 - protein, 14 aa, Artificial Sequence
  Description of Artificial Sequence: Synthetic peptide
  N-term Ac
  MOD_RES (4)..(4): Alpha-Me R8-octenyl-alanine olefin amino acid connected by an all-carbon crosslinker comprising one double bond
  misc_feature (4)..(11): Crosslink between residues
  MOD_RES (11)..(11): Alpha-Me S5-pentenyl-alanine olefin amino acid connected by an all-carbon crosslinker comprising one double bond
  C-term NH2
ETFAVYWAQLASWA

SEQ ID NO: 129 - protein, 14 aa, Artificial Sequence
  Description of Artificial Sequence: Synthetic peptide
  N-term Ac
  MOD_RES (4)..(4): Alpha-Me R8-octenyl-alanine olefin amino acid connected by an all-carbon crosslinker comprising one double bond
  misc_feature (4)..(11): Crosslink between residues
  MOD_RES (11)..(11): Alpha-Me S5-pentenyl-alanine olefin amino acid connected by an all-carbon crosslinker comprising one double bond
  C-term NH2
ETFAKYWAQLASWA

SEQ ID NO: 130 - protein, 14 aa, Artificial Sequence
  Description of Artificial Sequence: Synthetic peptide
  N-term Ac
  MOD_RES (4)..(4): Alpha-Me R8-octenyl-alanine olefin amino acid connected by an all-carbon crosslinker comprising one double bond
  misc_feature (4)..(11): Crosslink between residues
  MOD_RES (11)..(11): Alpha-Me S5-pentenyl-alanine olefin amino acid connected by an all-carbon crosslinker comprising one double bond
  C-term NH2
ETFAVYWAQLASVS

SEQ ID NO: 131 - protein, 14 aa, Artificial Sequence
  Description of Artificial Sequence: Synthetic peptide
  N-term Ac
  MOD_RES (4)..(4): Alpha-Me R8-octenyl-alanine olefin amino acid connected by an all-carbon crosslinker comprising one double bond
  misc_feature (4)..(11): Crosslink between residues
  MOD_RES (11)..(11): Alpha-Me S5-pentenyl-alanine olefin amino acid connected by an all-carbon crosslinker comprising one double bond
  C-term NH2
ETFAVYWAQLASAS

SEQ ID NO: 132 - protein, 14 aa, Artificial Sequence
  Description of Artificial Sequence: Synthetic peptide
  N-term Ac
  MOD_RES (4)..(4): Alpha-Me R8-octenyl-alanine olefin amino acid connected by an all-carbon crosslinker comprising one double bond
  misc_feature (4)..(11): Crosslink between residues
  MOD_RES (11)..(11): Alpha-Me S5-pentenyl-alanine olefin amino acid connected by an all-carbon crosslinker comprising one double bond
  C-term NH2
ETFAVYWAQLASVG

SEQ ID NO: 133 - protein, 14 aa, Artificial Sequence
  Description of Artificial Sequence: Synthetic peptide
  N-term Ac
  MOD_RES (4)..(4): Alpha-Me R8-octenyl-alanine olefin amino acid connected by an all-carbon crosslinker comprising one double bond
  misc_feature (4)..(11): Crosslink between residues
  MOD_RES (11)..(11): Alpha-Me S5-pentenyl-alanine olefin amino acid connected by an all-carbon crosslinker comprising one double bond
  MOD_RES (14)..(14): D-amino acid
  C-term NH2
LTFAVYWAQLASSA

SEQ ID NO: 134 - protein, 14 aa, Artificial Sequence
  Description of Artificial Sequence: Synthetic peptide
  N-term Ac
  MOD_RES (4)..(4): Alpha-Me R8-octenyl-alanine olefin amino acid connected by an all-carbon crosslinker comprising one double bond
  misc_feature (4)..(11): Crosslink between residues
  MOD_RES (11)..(11): Alpha-Me S5-pentenyl-alanine olefin amino acid connected by an all-carbon crosslinker comprising one double bond
  MOD_RES (14)..(14): D-amino acid
  C-term NH2
ETFAVYWAQLASSA

SEQ ID NO: 135 - protein, 14 aa, Artificial Sequence
  Description of Artificial Sequence: Synthetic peptide
  N-term Ac
  MOD_RES (4)..(4): Alpha-Me R8-octenyl-alanine olefin amino acid connected by an all-carbon crosslinker comprising one double bond
  misc_feature (4)..(11): Crosslink between residues
  MOD_RES (11)..(11): Alpha-Me S5-pentenyl-alanine olefin amino acid connected by an all-carbon crosslinker comprising one double bond
  MOD_RES (14)..(14): D-amino acid
  C-term NH2
LTFAVYWAQLASNA

SEQ ID NO: 136 - protein, 14 aa, Artificial Sequence
  Description of Artificial Sequence: Synthetic peptide
  N-term Ac
  MOD_RES (4)..(4): Alpha-Me R8-octenyl-alanine olefin amino acid connected by an all-carbon crosslinker comprising one double bond
  misc_feature (4)..(11): Crosslink between residues
  MOD_RES (11)..(11): Alpha-Me S5-pentenyl-alanine olefin amino acid connected by an all-carbon crosslinker comprising one double bond
  MOD_RES (14)..(14): D-amino acid
  C-term NH2
ETFAVYWAQLASNA

SEQ ID NO: 137 - protein, 14 aa, Artificial Sequence
  Description of Artificial Sequence: Synthetic peptide
  N-term Ac
  MOD_RES (4)..(4): Alpha-Me R8-octenyl-alanine olefin amino acid connected by an all-carbon crosslinker comprising one double bond
  misc_feature (4)..(11): Crosslink between residues
  MOD_RES (11)..(11): Alpha-Me S5-pentenyl-alanine olefin amino acid connected by an all-carbon crosslinker comprising one double bond
  MOD_RES (14)..(14): D-amino acid
  C-term NH2
LTFAVYWAQLASAA

SEQ ID NO: 138 - protein, 14 aa, Artificial Sequence
  Description of Artificial Sequence: Synthetic peptide
  N-term Ac
  MOD_RES (4)..(4): Alpha-Me R8-octenyl-alanine olefin amino acid connected by an all-carbon crosslinker comprising one double bond
  misc_feature (4)..(11): Crosslink between residues
  MOD_RES (11)..(11): Alpha-Me S5-pentenyl-alanine olefin amino acid connected by an all-carbon crosslinker comprising one double bond
  C-term NH2
LTFAVYWAQLASVA

SEQ ID NO: 139 - protein, 14 aa, Artificial Sequence
  Description of Artificial Sequence: Synthetic peptide
  N-term Ac
  MOD_RES (4)..(4): Alpha-Me R8-octenyl-alanine olefin amino acid connected by an all-carbon crosslinker comprising one double bond
  misc_feature (4)..(11): Crosslink between residues
  MOD_RES (11)..(11): Alpha-Me S5-pentenyl-alanine olefin amino acid connected by an all-carbon crosslinker comprising one double bond
  C-term NH2
LTFAVYWAQLASVA

SEQ ID NO: 140 - protein, 14 aa, Artificial Sequence
  Description of Artificial Sequence: Synthetic peptide
  N-term Ac
  MOD_RES (4)..(4): Alpha-Me R8-octenyl-alanine olefin amino acid connected by an all-carbon crosslinker comprising one double bond
  misc_feature (4)..(11): Crosslink between residues
  MOD_RES (11)..(11): Alpha-Me S5-pentenyl-alanine olefin amino acid connected by an all-carbon crosslinker comprising one double bond
  C-term NH2
LTFAVYWAQLASWA

SEQ ID NO: 141 - protein, 14 aa, Artificial Sequence
  Description of Artificial Sequence: Synthetic peptide
  N-term Ac
  MOD_RES (4)..(4): Alpha-Me R8-octenyl-alanine olefin amino acid connected by an all-carbon crosslinker comprising one double bond
  misc_feature (4)..(11): Crosslink between residues
  MOD_RES (11)..(11): Alpha-Me S5-pentenyl-alanine olefin amino acid connected by an all-carbon crosslinker comprising one double bond
  C-term NH2
LTFAVYWAQLASVS

SEQ ID NO: 142 - protein, 14 aa, Artificial Sequence
  Description of Artificial Sequence: Synthetic peptide
  N-term Ac
  MOD_RES (4)..(4): Alpha-Me R8-octenyl-alanine olefin amino acid connected by an all-carbon crosslinker comprising one double bond
  misc_feature (4)..(11): Crosslink between residues
  MOD_RES (11)..(11): Alpha-Me S5-pentenyl-alanine olefin amino acid connected by an all-carbon crosslinker comprising one double bond
  C-term NH2
LTFAVYWAQLASVS

SEQ ID NO: 143 - protein, 14 aa, Artificial Sequence
  Description of Artificial Sequence: Synthetic peptide
  N-term Ac
  MOD_RES (4)..(4): Alpha-Me R8-octenyl-alanine olefin amino acid connected by an all-carbon crosslinker comprising one double bond
  misc_feature (4)..(11): Crosslink between residues
  MOD_RES (11)..(11): Alpha-Me S5-pentenyl-alanine olefin amino acid connected by an all-carbon crosslinker comprising one double bond
  C-term NH2
LTFAVYWAQLASAS

SEQ ID NO: 144 - protein, 14 aa, Artificial Sequence
  Description of Artificial Sequence: Synthetic peptide
  N-term Ac
  MOD_RES (4)..(4): Alpha-Me R8-octenyl-alanine olefin amino acid connected by an all-carbon crosslinker comprising one double bond
  misc_feature (4)..(11): Crosslink between residues
  MOD_RES (11)..(11): Alpha-Me S5-pentenyl-alanine olefin amino acid connected by an all-carbon crosslinker comprising one double bond
  C-term NH2
LTFAVYWAQLASAS

SEQ ID NO: 145 - protein, 14 aa, Artificial Sequence
  Description of Artificial Sequence: Synthetic peptide
  N-term Ac
  MOD_RES (4)..(4): Alpha-Me R8-octenyl-alanine olefin amino acid connected by an all-carbon crosslinker comprising one double bond
  misc_feature (4)..(11): Crosslink between residues
  MOD_RES (11)..(11): Alpha-Me S5-pentenyl-alanine olefin amino acid connected by an all-carbon crosslinker comprising one double bond
  C-term NH2
LTFAVYWAQLASVG

SEQ ID NO: 146 - protein, 14 aa, Artificial Sequence
  Description of Artificial Sequence: Synthetic peptide
  N-term Ac
  MOD_RES (4)..(4): Alpha-Me R8-octenyl-alanine olefin amino acid connected by an all-carbon crosslinker comprising one double bond
  misc_feature (4)..(11): Crosslink between residues
  MOD_RES (11)..(11): Alpha-Me S5-pentenyl-alanine olefin amino acid connected by an all-carbon crosslinker comprising one double bond
  C-term NH2
LTFAVYWAQLASVG

SEQ ID NO: 147 - protein, 14 aa, Artificial Sequence
  Description of Artificial Sequence: Synthetic peptide
  N-term Ac
  MOD_RES (4)..(4): Alpha-Me R8-octenyl-alanine olefin amino acid connected by an all-carbon crosslinker comprising one double bond
  misc_feature (4)..(11): Crosslink between residues
  MOD_RES (10)..(10): Cyclohexyl-Ala
  MOD_RES (11)..(11): Alpha-Me S5-pentenyl-alanine olefin amino acid connected by an all-carbon crosslinker comprising one double bond
  C-term NH2
LTFAEYWAQAASAA

SEQ ID NO: 148 - protein, 14 aa, Artificial Sequence
  Description of Artificial Sequence: Synthetic peptide
  N-term Ac
  MOD_RES (4)..(4): Alpha-Me R8-octenyl-alanine olefin amino acid connected by an all-carbon crosslinker comprising one double bond
  misc_feature (4)..(11): Crosslink between residues
  MOD_RES (10)..(10): Cyclohexyl-Ala
  MOD_RES (11)..(11): Alpha-Me S5-pentenyl-alanine olefin amino acid connected by an all-carbon crosslinker comprising one double bond
  C-term NH2
LTFAEYWAQAASAA

SEQ ID NO: 149 - protein, 14 aa, Artificial Sequence
  Description of Artificial Sequence: Synthetic peptide
  N-term Ac
  MOD_RES (4)..(4): Alpha-Me R8-octenyl-alanine olefin amino acid connected by an all-carbon crosslinker comprising one double bond
  misc_feature (4)..(11): Crosslink between residues
  MOD_RES (10)..(10): Cyclopentyl-Gly
  MOD_RES (11)..(11): Alpha-Me S5-pentenyl-alanine olefin amino acid connected by an all-carbon crosslinker comprising one double bond
  C-term NH2
LTFAEYWAQGASAA

SEQ ID NO: 150 - protein, 14 aa, Artificial Sequence
  Description of Artificial Sequence: Synthetic peptide
  N-term Ac
  MOD_RES (4)..(4): Alpha-Me R8-octenyl-alanine olefin amino acid connected by an all-carbon crosslinker comprising one double bond
  misc_feature (4)..(11): Crosslink between residues
  MOD_RES (10)..(10): Cyclopentyl-Gly
  MOD_RES (11)..(11): Alpha-Me S5-pentenyl-alanine olefin amino acid connected by an all-carbon crosslinker comprising one double bond
  C-term NH2
LTFAEYWAQGASAA

SEQ ID NO: 151 - protein, 14 aa, Artificial Sequence
  Description of Artificial Sequence: Synthetic peptide
  N-term Ac
  MOD_RES (4)..(4): Alpha-Me R8-octenyl-alanine olefin amino acid connected by an all-carbon crosslinker comprising one double bond
  misc_feature (4)..(11): Crosslink between residues
  MOD_RES (11)..(11): Alpha-Me S5-pentenyl-alanine olefin amino acid connected by an all-carbon crosslinker comprising one double bond
  C-term NH2
LTFAEYWAQFASAA

SEQ ID NO: 152 - protein, 14 aa, Artificial Sequence
  Description of Artificial Sequence: Synthetic peptide
  N-term Ac
  MOD_RES (4)..(4): Alpha-Me R8-octenyl-alanine olefin amino acid connected by an all-carbon crosslinker comprising one double bond
  misc_feature (4)..(11): Crosslink between residues
  MOD_RES (11)..(11): Alpha-Me S5-pentenyl-alanine olefin amino acid connected by an all-carbon crosslinker comprising one double bond
  C-term NH2
LTFAEYWAQFASAA

SEQ ID NO: 153 - protein, 14 aa, Artificial Sequence
  Description of Artificial Sequence: Synthetic peptide
  N-term Ac
  MOD_RES (4)..(4): Alpha-Me R8-octenyl-alanine olefin amino acid connected by an all-carbon crosslinker comprising one double bond
  misc_feature (4)..(11): Crosslink between residues
  MOD_RES (10)..(10): Cyclobutyl-Ala
  MOD_RES (11)..(11): Alpha-Me S5-pentenyl-alanine olefin amino acid connected by an all-carbon crosslinker comprising one double bond
  C-term NH2
LTFAEYWAQAASAA

SEQ ID NO: 154 - protein, 14 aa, Artificial Sequence
  Description of Artificial Sequence: Synthetic peptide
  N-term Ac
  MOD_RES (4)..(4): Alpha-Me R8-octenyl-alanine olefin amino acid connected by an all-carbon crosslinker comprising one double bond
  misc_feature (4)..(11): Crosslink between residues
  MOD_RES (10)..(10): Cyclobutyl-Ala
  MOD_RES (11)..(11): Alpha-Me S5-pentenyl-alanine olefin amino acid connected by an all-carbon crosslinker comprising one double bond
  C-term NH2
LTFAEYWAQAASAA

SEQ ID NO: 155 - protein, 14 aa, Artificial Sequence
  Description of Artificial Sequence: Synthetic peptide
  N-term Ac
  MOD_RES (3)..(3): 3-Chloro-Phe
  MOD_RES (4)..(4): Alpha-Me R8-octenyl-alanine olefin amino acid connected by an all-carbon crosslinker comprising one double bond
  misc_feature (4)..(11): Crosslink between residues
  MOD_RES (11)..(11): Alpha-Me S5-pentenyl-alanine olefin amino acid connected by an all-carbon crosslinker comprising one double bond
  C-term NH2
LTFAEYWAQLASAA

SEQ ID NO: 156 - protein, 14 aa, Artificial Sequence
  Description of Artificial Sequence: Synthetic peptide
  N-term Ac
  MOD_RES (3)..(3): 3-Chloro-Phe
  MOD_RES (4)..(4): Alpha-Me R8-octenyl-alanine olefin amino acid connected by an all-carbon crosslinker comprising one double bond
  misc_feature (4)..(11): Crosslink between residues
  MOD_RES (11)..(11): Alpha-Me S5-pentenyl-alanine olefin amino acid connected by an all-carbon crosslinker comprising one double bond
  C-term NH2
LTFAEYWAQLASAA

SEQ ID NO: 157 - protein, 14 aa, Artificial Sequence
  Description of Artificial Sequence: Synthetic peptide
  N-term Ac
  MOD_RES (3)..(3): 3,4-difluoro Phe
  MOD_RES (4)..(4): Alpha-Me R8-octenyl-alanine olefin amino acid connected by an all-carbon crosslinker comprising one double bond
  misc_feature (4)..(11): Crosslink between residues
  MOD_RES (11)..(11): Alpha-Me S5-pentenyl-alanine olefin amino acid connected by an all-carbon crosslinker comprising one double bond
  C-term NH2
LTFAEYWAQLASAA

SEQ ID NO: 158 - protein, 14 aa, Artificial Sequence
  Description of Artificial Sequence: Synthetic peptide
  N-term Ac
  MOD_RES (3)..(3): 3,4-difluoro Phe
  MOD_RES (4)..(4): Alpha-Me R8-octenyl-alanine olefin amino acid connected by an all-carbon crosslinker comprising one double bond
  misc_feature (4)..(11): Crosslink between residues
  MOD_RES (11)..(11): Alpha-Me S5-pentenyl-alanine olefin amino acid connected by an all-carbon crosslinker comprising one double bond
  C-term NH2
LTFAEYWAQLASAA

SEQ ID NO: 159 - protein, 14 aa, Artificial Sequence
  Description of Artificial Sequence: Synthetic peptide
  N-term Ac
  MOD_RES (3)..(3): 3,4-difluoro Phe
  MOD_RES (4)..(4): Alpha-Me R8-octenyl-alanine olefin amino acid connected by an all-carbon crosslinker comprising one double bond
  misc_feature (4)..(11): Crosslink between residues
  MOD_RES (10)..(10): hLeu
  MOD_RES (11)..(11): Alpha-Me S5-pentenyl-alanine olefin amino acid connected by an all-carbon crosslinker comprising one double bond
  C-term NH2
LTFAEYWAQLASAA

SEQ ID NO: 160 - protein, 14 aa, Artificial Sequence
  Description of Artificial Sequence: Synthetic peptide
  N-term Ac
  MOD_RES (3)..(3): 3,4-difluoro Phe
  MOD_RES (4)..(4): Alpha-Me R8-octenyl-alanine olefin amino acid connected by an all-carbon crosslinker comprising one double bond
  misc_feature (4)..(11): Crosslink between residues
  MOD_RES (10)..(10): hLeu
  MOD_RES (11)..(11): Alpha-Me S5-pentenyl-alanine olefin amino acid connected by an all-carbon crosslinker comprising one double bond
  C-term NH2
LTFAEYWAQLASAA

SEQ ID NO: 161 - protein, 14 aa, Artificial Sequence
  Description of Artificial Sequence: Synthetic peptide
  N-term Ac
  MOD_RES (4)..(4): Alpha-Me R8-octenyl-alanine olefin amino acid connected by an all-carbon crosslinker comprising one double bond
  misc_feature (4)..(11): Crosslink between residues
  MOD_RES (11)..(11): Alpha-Me S5-pentenyl-alanine olefin amino acid connected by an all-carbon crosslinker comprising one double bond
  C-term NH2
ETFAEYWAQLASAA

SEQ ID NO: 162 - protein, 14 aa, Artificial Sequence
  Description of Artificial Sequence: Synthetic peptide
  N-term Ac
  MOD_RES (4)..(4): Alpha-Me R8-octenyl-alanine olefin amino acid connected by an all-carbon crosslinker comprising one double bond
  misc_feature (4)..(11): Crosslink between residues
  MOD_RES (11)..(11): Alpha-Me S5-pentenyl-alanine olefin amino acid connected by an all-carbon crosslinker comprising one double bond
  C-term NH2
LTFAAYWVQLASAA

SEQ ID NO: 163 - protein, 14 aa, Artificial Sequence
  Description of Artificial Sequence: Synthetic peptide
  N-term Ac
  MOD_RES (4)..(4): Alpha-Me R8-octenyl-alanine olefin amino acid connected by an all-carbon crosslinker comprising one double bond
  misc_feature (4)..(11): Crosslink between residues
  MOD_RES (11)..(11): Alpha-Me S5-pentenyl-alanine olefin amino acid connected by an all-carbon crosslinker comprising one double bond
  C-term NH2
LTFAAHWAQLASAA

SEQ ID NO: 164 - protein, 14 aa, Artificial Sequence
  Description of Artificial Sequence: Synthetic peptide
  N-term Ac
  MOD_RES (4)..(4): Alpha-Me R8-octenyl-alanine olefin amino acid connected by an all-carbon crosslinker comprising one double bond
  misc_feature (4)..(11): Crosslink between residues
  MOD_RES (11)..(11): Alpha-Me S5-pentenyl-alanine olefin amino acid connected by an all-carbon crosslinker comprising one double bond
  C-term NH2
LTFAAEWAQLASAA

SEQ ID NO: 165 - protein, 14 aa, Artificial Sequence
  Description of Artificial Sequence: Synthetic peptide
  N-term Ac
  MOD_RES (4)..(4): Alpha-Me R8-octenyl-alanine olefin amino acid connected by an all-carbon crosslinker comprising one double bond
  misc_feature (4)..(11): Crosslink between residues
  MOD_RES (11)..(11): Alpha-Me S5-pentenyl-alanine olefin amino acid connected by an all-carbon crosslinker comprising one double bond
  C-term NH2
LTFAASWAQLASAA

SEQ ID NO: 166 - protein, 14 aa, Artificial Sequence
  Description of Artificial Sequence: Synthetic peptide
  N-term Ac
  MOD_RES (4)..(4): Alpha-Me R8-octenyl-alanine olefin amino acid connected by an all-carbon crosslinker comprising one double bond
  misc_feature (4)..(11): Crosslink between residues
  MOD_RES (11)..(11): Alpha-Me S5-pentenyl-alanine olefin amino acid connected by an all-carbon crosslinker comprising one double bond
  C-term NH2
LTFAAEWAQLASAA

SEQ ID NO: 167 - protein, 14 aa, Artificial Sequence
  Description of Artificial Sequence: Synthetic peptide
  N-term Ac
  MOD_RES (4)..(4): Alpha-Me R8-octenyl-alanine olefin amino acid connected by an all-carbon crosslinker comprising one double bond
  misc_feature (4)..(11): Crosslink between residues
  MOD_RES (11)..(11): Alpha-Me S5-pentenyl-alanine olefin amino acid connected by an all-carbon crosslinker comprising one double bond
  C-term NH2
LTFAASWAQLASAA

SEQ ID NO: 168 - protein, 14 aa, Artificial Sequence
  Description of Artificial Sequence: Synthetic peptide
  N-term Ac
  MOD_RES (4)..(4): Alpha-Me R8-octenyl-alanine olefin amino acid connected by an all-carbon crosslinker comprising one double bond
  misc_feature (4)..(11): Crosslink between residues
  MOD_RES (6)..(6): 4-carboxy Phe
  MOD_RES (11)..(11): Alpha-Me S5-pentenyl-alanine olefin amino acid connected by an all-carbon crosslinker comprising one double bond
  C-term NH2
LTFAAFWAQLASAA

SEQ ID NO: 169 - protein, 14 aa, Artificial Sequence
  Description of Artificial Sequence: Synthetic peptide
  N-term Ac
  MOD_RES (4)..(4): Alpha-Me R8-octenyl-alanine olefin amino acid connected by an all-carbon crosslinker comprising one double bond
  misc_feature (4)..(11): Crosslink between residues
  MOD_RES (6)..(6): 4-carboxy Phe
  MOD_RES (11)..(11): Alpha-Me S5-pentenyl-alanine olefin amino acid connected by an all-carbon crosslinker comprising one double bond
  C-term NH2
LTFAAFWAQLASAA

SEQ ID NO: 170 - protein, 15 aa, Artificial Sequence
  Description of Artificial Sequence: Synthetic peptide
  N-term Ac
  MOD_RES (4)..(4): Alpha-Me R8-octenyl-alanine olefin amino acid connected by an all-carbon crosslinker comprising one double bond
  misc_feature (4)..(11): Crosslink between residues
  MOD_RES (11)..(11): Alpha-Me S5-pentenyl-alanine olefin amino acid connected by an all-carbon crosslinker comprising one double bond
  MOD_RES (15)..(15): D-amino acid
  C-term NH2
LTFAAHWAQLAAAIA

SEQ ID NO: 171 - protein, 15 aa, Artificial Sequence
  Description of Artificial Sequence: Synthetic peptide
  N-term Ac
  MOD_RES (4)..(4): Alpha-Me R8-octenyl-alanine olefin amino acid connected by an all-carbon crosslinker comprising one double bond
  misc_feature (4)..(11): Crosslink between residues
  MOD_RES (11)..(11): Alpha-Me S5-pentenyl-alanine olefin amino acid connected by an all-carbon crosslinker comprising one double bond
  MOD_RES (15)..(15): D-amino acid
  C-term NH2
ITFAFYWAQLAAAIA

SEQ ID NO: 172 - protein, 15 aa, Artificial Sequence
  Description of Artificial Sequence: Synthetic peptide
  N-term Ac
  MOD_RES (4)..(4): Alpha-Me R8-octenyl-alanine olefin amino acid connected by an all-carbon crosslinker comprising one double bond
  misc_feature (4)..(11): Crosslink between residues
  MOD_RES (11)..(11): Alpha-Me S5-pentenyl-alanine olefin amino acid connected by an all-carbon crosslinker comprising one double bond
  MOD_RES (15)..(15): D-amino acid
  C-term NH2
ITFAEHWAQLAAAIA

SEQ ID NO: 173 - protein, 15 aa, Artificial Sequence
  Description of Artificial Sequence: Synthetic peptide
  N-term Ac
  MOD_RES (4)..(4): Alpha-Me R8-octenyl-alanine olefin amino acid connected by an all-carbon crosslinker comprising one double bond
  misc_feature (4)..(11): Crosslink between residues
  MOD_RES (11)..(11): Alpha-Me S5-pentenyl-alanine olefin amino acid connected by an all-carbon crosslinker comprising one double bond
  MOD_RES (15)..(15): D-amino acid
  C-term NH2
ITFAEHWAQLAAAIA

SEQ ID NO: 174 - protein, 15 aa, Artificial Sequence
  Description of Artificial Sequence: Synthetic peptide
  N-term Ac
  MOD_RES (4)..(4): Alpha-Me R8-octenyl-alanine olefin amino acid connected by an all-carbon crosslinker comprising one double bond
  misc_feature (4)..(11): Crosslink between residues
  MOD_RES (11)..(11): Alpha-Me S5-pentenyl-alanine olefin amino acid connected by an all-carbon crosslinker comprising one double bond
  MOD_RES (15)..(15): D-amino acid
  C-term NH2
ETFAEHWAQLAAAIA

SEQ ID NO: 175 - protein, 15 aa, Artificial Sequence
  Description of Artificial Sequence: Synthetic peptide
  N-term Ac
  MOD_RES (4)..(4): Alpha-Me R8-octenyl-alanine olefin amino acid connected by an all-carbon crosslinker comprising one double bond
  misc_feature (4)..(11): Crosslink between residues
  MOD_RES (11)..(11): Alpha-Me S5-pentenyl-alanine olefin amino acid connected by an all-carbon crosslinker comprising one double bond
  MOD_RES (15)..(15): D-amino acid
  C-term NH2
ETFAEHWAQLAAAIA

SEQ ID NO: 176 - protein, 15 aa, Artificial Sequence
  Description of Artificial Sequence: Synthetic peptide
  N-term Ac
  MOD_RES (4)..(4): Alpha-Me R8-octenyl-alanine olefin amino acid connected by an all-carbon crosslinker comprising one double bond
  misc_feature (4)..(11): Crosslink between residues
  MOD_RES (11)..(11): Alpha-Me S5-pentenyl-alanine olefin amino acid connected by an all-carbon crosslinker comprising one double bond
  MOD_RES (15)..(15): D-amino acid
  C-term NH2
LTFAAHWVQLAAAIA

SEQ ID NO: 177 - protein, 15 aa, Artificial Sequence
  Description of Artificial Sequence: Synthetic peptide
  N-term Ac
  MOD_RES (4)..(4): Alpha-Me R8-octenyl-alanine olefin amino acid connected by an all-carbon crosslinker comprising one double bond
  misc_feature (4)..(11): Crosslink between residues
  MOD_RES (11)..(11): Alpha-Me S5-pentenyl-alanine olefin amino acid connected by an all-carbon crosslinker comprising one double bond
  MOD_RES (15)..(15): D-amino acid
  C-term NH2
ITFAFYWVQLAAAIA

SEQ ID NO: 178 - protein, 15 aa, Artificial Sequence
  Description of Artificial Sequence: Synthetic peptide
  N-term Ac
  MOD_RES (4)..(4): Alpha-Me R8-octenyl-alanine olefin amino acid connected by an all-carbon crosslinker comprising one double bond
  misc_feature (4)..(11): Crosslink between residues
  MOD_RES (11)..(11): Alpha-Me S5-pentenyl-alanine olefin amino acid connected by an all-carbon crosslinker comprising one double bond
  MOD_RES (15)..(15): D-amino acid
  C-term NH2
ITFAEYWVQLAAAIA

SEQ ID NO: 179 - protein, 15 aa, Artificial Sequence
  Description of Artificial Sequence: Synthetic peptide
  N-term Ac
  MOD_RES (4)..(4): Alpha-Me R8-octenyl-alanine olefin amino acid connected by an all-carbon crosslinker comprising one double bond
  misc_feature (4)..(11): Crosslink between residues
  MOD_RES (11)..(11): Alpha-Me S5-pentenyl-alanine olefin amino acid connected by an all-carbon crosslinker comprising one double bond
  MOD_RES (15)..(15): D-amino acid
  C-term NH2
ITFAEHWVQLAAAIA

SEQ ID NO: 180 - protein, 15 aa, Artificial Sequence
  Description of Artificial Sequence: Synthetic peptide
  N-term Ac
  MOD_RES (4)..(4): Alpha-Me R8-octenyl-alanine olefin amino acid connected by an all-carbon crosslinker comprising one double bond
  misc_feature (4)..(11): Crosslink between residues
  MOD_RES (11)..(11): Alpha-Me S5-pentenyl-alanine olefin amino acid connected by an all-carbon crosslinker comprising one double bond
  MOD_RES (15)..(15): D-amino acid
  C-term NH2
LTFAAEWAQLAAAIA

SEQ ID NO: 181 - protein, 15 aa, Artificial Sequence
  Description of Artificial Sequence: Synthetic peptide
  N-term Ac
  MOD_RES (4)..(4): Alpha-Me R8-octenyl-alanine olefin amino acid connected by an all-carbon crosslinker comprising one double bond
  misc_feature (4)..(11): Crosslink between residues
  MOD_RES (6)..(6): 4-carboxy Phe
  MOD_RES (11)..(11): Alpha-Me S5-pentenyl-alanine olefin amino acid connected by an all-carbon crosslinker comprising one double bond
  MOD_RES (15)..(15): D-amino acid
  C-term NH2
LTFAAFWAQLAAAIA

SEQ ID NO: 182 - protein, 15 aa, Artificial Sequence
  Description of Artificial Sequence: Synthetic peptide
  N-term Ac
  MOD_RES (4)..(4): Alpha-Me R8-octenyl-alanine olefin amino acid connected by an all-carbon crosslinker comprising one double bond
  misc_feature (4)..(11): Crosslink between residues
  MOD_RES (6)..(6): 4-carboxy Phe
  MOD_RES (11)..(11): Alpha-Me S5-pentenyl-alanine olefin amino acid connected by an all-carbon crosslinker comprising one double bond
  MOD_RES (15)..(15): D-amino acid
  C-term NH2
LTFAAFWAQLAAAIA

SEQ ID NO: 183 - protein, 15 aa, Artificial Sequence
  Description of Artificial Sequence: Synthetic peptide
  N-term Ac
  MOD_RES (4)..(4): Alpha-Me R8-octenyl-alanine olefin amino acid connected by an all-carbon crosslinker comprising one double bond
  misc_feature (4)..(11): Crosslink between residues
  MOD_RES (11)..(11): Alpha-Me S5-pentenyl-alanine olefin amino acid connected by an all-carbon crosslinker comprising one double bond
  C-term NH2
LTFAAHWAQLAAHFA

SEQ ID NO: 184 - protein, 15 aa, Artificial Sequence
  Description of Artificial Sequence: Synthetic peptide
  N-term Ac
  MOD_RES (4)..(4): Alpha-Me R8-octenyl-alanine olefin amino acid connected by an all-carbon crosslinker comprising one double bond
  misc_feature (4)..(11): Crosslink between residues
  MOD_RES (11)..(11): Alpha-Me S5-pentenyl-alanine olefin amino acid connected by an all-carbon crosslinker comprising one double bond
  C-term NH2
ITFAFYWAQLAAHFA

SEQ ID NO: 185 - protein, 15 aa, Artificial Sequence
  Description of Artificial Sequence: Synthetic peptide
  N-term Ac
  MOD_RES (4)..(4): Alpha-Me R8-octenyl-alanine olefin amino acid connected by an all-carbon crosslinker comprising one double bond
  misc_feature (4)..(11): Crosslink between residues
  MOD_RES (11)..(11): Alpha-Me S5-pentenyl-alanine olefin amino acid connected by an all-carbon crosslinker comprising one double bond
  C-term NH2
ITFAFYWAQLAAHFA

SEQ ID NO: 186 - protein, 15 aa, Artificial Sequence
  Description of Artificial Sequence: Synthetic peptide
  N-term Ac
  MOD_RES (4)..(4): Alpha-Me R8-octenyl-alanine olefin amino acid connected by an all-carbon crosslinker comprising one double bond
  misc_feature (4)..(11): Crosslink between residues
  MOD_RES (11)..(11): Alpha-Me S5-pentenyl-alanine olefin amino acid connected by an all-carbon crosslinker comprising one double bond
  C-term NH2
ITFAFHWAQLAAEFA

SEQ ID NO: 187 - protein, 15 aa, Artificial Sequence
  Description of Artificial Sequence: Synthetic peptide
  N-term Ac
  MOD_RES (4)..(4): Alpha-Me R8-octenyl-alanine olefin amino acid connected by an all-carbon crosslinker comprising one double bond
  misc_feature (4)..(11): Crosslink between residues
  MOD_RES (11)..(11): Alpha-Me S5-pentenyl-alanine olefin amino acid connected by an all-carbon crosslinker comprising one double bond
  C-term NH2
ITFAFHWAQLAAEFA

SEQ ID NO: 188 - protein, 15 aa, Artificial Sequence
  Description of Artificial Sequence: Synthetic peptide
  N-term Ac
  MOD_RES (4)..(4): Alpha-Me R8-octenyl-alanine olefin amino acid connected by an all-carbon crosslinker comprising one double bond
  misc_feature (4)..(11): Crosslink between residues
  MOD_RES (11)..(11): Alpha-Me S5-pentenyl-alanine olefin amino acid connected by an all-carbon crosslinker comprising one double bond
  C-term NH2
ITFAEHWAQLAAHFA

SEQ ID NO: 189 - protein, 15 aa, Artificial Sequence
  Description of Artificial Sequence: Synthetic peptide
  N-term Ac
  MOD_RES (4)..(4): Alpha-Me R8-octenyl-alanine olefin amino acid connected by an all-carbon crosslinker comprising one double bond
  misc_feature (4)..(11): Crosslink between residues
  MOD_RES (11)..(11): Alpha-Me S5-pentenyl-alanine olefin amino acid connected by an all-carbon crosslinker comprising one double bond
  C-term NH2
ITFAEHWAQLAAHFA

SEQ ID NO: 190 - protein, 15 aa, Artificial Sequence
  Description of Artificial Sequence: Synthetic peptide
  N-term Ac
  MOD_RES (4)..(4): Alpha-Me R8-octenyl-alanine olefin amino acid connected by an all-carbon crosslinker comprising one double bond
  misc_feature (4)..(11): Crosslink between residues
  MOD_RES (11)..(11): Alpha-Me S5-pentenyl-alanine olefin amino acid connected by an all-carbon crosslinker comprising one double bond
  C-term NH2
LTFAAHWVQLAAHFA

SEQ ID NO: 191 - protein, 15 aa, Artificial Sequence
  Description of Artificial Sequence: Synthetic peptide
  N-term Ac
  MOD_RES (4)..(4): Alpha-Me R8-octenyl-alanine olefin amino acid connected by an all-carbon crosslinker comprising one double bond
  misc_feature (4)..(11): Crosslink between residues
  MOD_RES (11)..(11): Alpha-Me S5-pentenyl-alanine olefin amino acid connected by an all-carbon crosslinker comprising one double bond
  C-term NH2
ITFAFYWVQLAAHFA

SEQ ID NO: 192 - protein, 15 aa, Artificial Sequence
  Description of Artificial Sequence: Synthetic peptide
  N-term Ac
  MOD_RES (4)..(4): Alpha-Me R8-octenyl-alanine olefin amino acid connected by an all-carbon crosslinker comprising one double bond
  misc_feature (4)..(11): Crosslink between residues
  MOD_RES (11)..(11): Alpha-Me S5-pentenyl-alanine olefin amino acid connected by an all-carbon crosslinker comprising one double bond
  C-term NH2
ITFAEYWVQLAAHFA

SEQ ID NO: 193 - protein, 15 aa, Artificial Sequence
  Description of Artificial Sequence: Synthetic peptide
  N-term Ac
  MOD_RES (4)..(4): Alpha-Me R8-octenyl-alanine olefin amino acid connected by an all-carbon crosslinker comprising one double bond
  misc_feature (4)..(11): Crosslink between residues
  MOD_RES (11)..(11): Alpha-Me S5-pentenyl-alanine olefin amino acid connected by an all-carbon crosslinker comprising one double bond
  C-term NH2
ITFAEHWVQLAAHFA

SEQ ID NO: 194 - protein, 15 aa, Artificial Sequence
  Description of Artificial Sequence: Synthetic peptide
  N-term Ac
  MOD_RES (4)..(4): Alpha-Me R8-octenyl-alanine olefin amino acid connected by an all-carbon crosslinker comprising one double bond
  misc_feature (4)..(11): Crosslink between residues
  MOD_RES (11)..(11): Alpha-Me S5-pentenyl-alanine olefin amino acid connected by an all-carbon crosslinker comprising one double bond
  C-term NH2
ITFAEHWVQLAAHFA

SEQ ID NO: 195 - protein, 14 aa, Artificial Sequence
  Description of Artificial Sequence: Synthetic peptide
  N-term Ac
  MOD_RES (4)..(4): Alpha-Me R8-octenyl-alanine olefin amino acid connected by an all-carbon crosslinker comprising one double bond
  misc_feature (4)..(11): Crosslink between residues
  MOD_RES (11)..(11): Alpha-Me S5-pentenyl-alanine olefin amino acid connected by an all-carbon crosslinker comprising one double bond
  C-term NH2
ETFAEYWAALASAA

SEQ ID NO: 196 - protein, 14 aa, Artificial Sequence
  Description of Artificial Sequence: Synthetic peptide
  N-term Ac
  MOD_RES (4)..(4): Alpha-Me R8-octenyl-alanine olefin amino acid connected by an all-carbon crosslinker comprising one double bond
  misc_feature (4)..(11): Crosslink between residues
  MOD_RES (11)..(11): Alpha-Me S5-pentenyl-alanine olefin amino acid connected by an all-carbon crosslinker comprising one double bond
  C-term NH2
LTFAAYWVALASAA

SEQ ID NO: 197 - protein, 14 aa, Artificial Sequence
  Description of Artificial Sequence: Synthetic peptide
  N-term Ac
  MOD_RES (4)..(4): Alpha-Me R8-octenyl-alanine olefin amino acid connected by an all-carbon crosslinker comprising one double bond
  misc_feature (4)..(11): Crosslink between residues
  MOD_RES (11)..(11): Alpha-Me S5-pentenyl-alanine olefin amino acid connected by an all-carbon crosslinker comprising one double bond
  C-term NH2
LTFAAHWAALASAA

SEQ ID NO: 198 - protein, 14 aa, Artificial Sequence
  Description of Artificial Sequence: Synthetic peptide
  N-term Ac
  MOD_RES (4)..(4): Alpha-Me R8-octenyl-alanine olefin amino acid connected by an all-carbon crosslinker comprising one double bond
  misc_feature (4)..(11): Crosslink between residues
  MOD_RES (11)..(11): Alpha-Me S5-pentenyl-alanine olefin amino acid connected by an all-carbon crosslinker comprising one double bond
  C-term NH2
LTFAAEWAALASAA

SEQ ID NO: 199 - protein, 14 aa, Artificial Sequence
  Description of Artificial Sequence: Synthetic peptide
  N-term Ac
  MOD_RES (4)..(4): Alpha-Me R8-octenyl-alanine olefin amino acid connected by an all-carbon crosslinker comprising one double bond
  misc_feature (4)..(11): Crosslink between residues
  MOD_RES (11)..(11): Alpha-Me S5-pentenyl-alanine olefin amino acid connected by an all-carbon crosslinker comprising one double bond
  C-term NH2
LTFAAEWAALASAA

SEQ ID NO: 200 - protein, 14 aa, Artificial Sequence
  Description of Artificial Sequence: Synthetic peptide
  N-term Ac
  MOD_RES (4)..(4): Alpha-Me R8-octenyl-alanine olefin amino acid connected by an all-carbon crosslinker comprising one double bond
  misc_feature (4)..(11): Crosslink between residues
  MOD_RES (11)..(11): Alpha-Me S5-pentenyl-alanine olefin amino acid connected by an all-carbon crosslinker comprising one double bond
  C-term NH2
LTFAASWAALASAA

SEQ ID NO: 201 - protein, 14 aa, Artificial Sequence
  Description of Artificial Sequence: Synthetic peptide
  N-term Ac
  MOD_RES (4)..(4): Alpha-Me R8-octenyl-alanine olefin amino acid connected by an all-carbon crosslinker comprising one double bond
  misc_feature (4)..(11): Crosslink between residues
  MOD_RES (11)..(11): Alpha-Me S5-pentenyl-alanine olefin amino acid connected by an all-carbon crosslinker comprising one double bond
  C-term NH2
LTFAASWAALASAA

SEQ ID NO: 202 - protein, 15 aa, Artificial Sequence
  Description of Artificial Sequence: Synthetic peptide
  N-term Ac
  MOD_RES (4)..(4): Alpha-Me R8-octenyl-alanine olefin amino acid connected by an all-carbon crosslinker comprising one double bond
  misc_feature (4)..(11): Crosslink between residues
  MOD_RES (11)..(11): Alpha-Me S5-pentenyl-alanine olefin amino acid connected by an all-carbon crosslinker comprising one double bond
  MOD_RES (15)..(15): D-amino acid
  C-term NH2
LTFAAYWAALAAAIA

SEQ ID NO: 203 - protein, 15 aa, Artificial Sequence
  Description of Artificial Sequence: Synthetic peptide
  N-term Ac
  MOD_RES (4)..(4): Alpha-Me R8-octenyl-alanine olefin amino acid connected by an all-carbon crosslinker comprising one double bond
  misc_feature (4)..(11): Crosslink between residues
  MOD_RES (11)..(11): Alpha-Me S5-pentenyl-alanine olefin amino acid connected by an all-carbon crosslinker comprising one double bond
  MOD_RES (15)..(15): D-amino acid
  C-term NH2
LTFAAYWAALAAAIA

SEQ ID NO: 204 - protein, 15 aa, Artificial Sequence
  Description of Artificial Sequence: Synthetic peptide
  N-term Ac
  MOD_RES (4)..(4): Alpha-Me R8-octenyl-alanine olefin amino acid connected by an all-carbon crosslinker comprising one double bond
  misc_feature (4)..(11): Crosslink between residues
  MOD_RES (11)..(11): Alpha-Me S5-pentenyl-alanine olefin amino acid connected by an all-carbon crosslinker comprising one double bond
  C-term NH2
LTFAAYWAALAAHFA

SEQ ID NO: 205 - protein, 15 aa, Artificial Sequence
  Description of Artificial Sequence: Synthetic peptide
  N-term Ac
  MOD_RES (4)..(4): Alpha-Me R8-octenyl-alanine olefin amino acid connected by an all-carbon crosslinker comprising one double bond
  misc_feature (4)..(11): Crosslink between residues
  MOD_RES (11)..(11): Alpha-Me S5-pentenyl-alanine olefin amino acid connected by an all-carbon crosslinker comprising one double bond
  MOD_RES (15)..(15): D-amino acid
  C-term NH2
LTFAEHWAQLAAHIA

SEQ ID NO: 206 - protein, 15 aa, Artificial Sequence
  Description of Artificial Sequence: Synthetic peptide
  N-term Ac
  MOD_RES (4)..(4): Alpha-Me R8-octenyl-alanine olefin amino acid connected by an all-carbon crosslinker comprising one double bond
  misc_feature (4)..(11): Crosslink between residues
  MOD_RES (11)..(11): Alpha-Me S5-pentenyl-alanine olefin amino acid connected by an all-carbon crosslinker comprising one double bond
  MOD_RES (15)..(15): D-amino acid
  C-term NH2
LTFAEHWAQLAAHIA

SEQ ID NO: 207 - protein, 15 aa, Artificial Sequence
  Description of Artificial Sequence: Synthetic peptide
  N-term Ac
  MOD_RES (4)..(4): Alpha-Me R8-octenyl-alanine olefin amino acid connected by an all-carbon crosslinker comprising one double bond
  misc_feature (4)..(11): Crosslink between residues
  MOD_RES (11)..(11): Alpha-Me S5-pentenyl-alanine olefin amino acid connected by an all-carbon crosslinker comprising one double bond
  MOD_RES (15)..(15): D-amino acid
  C-term NH2
LTFAAHWAQLAAHIA

SEQ ID NO: 208 - protein, 15 aa, Artificial Sequence
  Description of Artificial Sequence: Synthetic peptide
  N-term Ac
  MOD_RES (4)..(4): Alpha-Me R8-octenyl-alanine olefin amino acid connected by an all-carbon crosslinker comprising one double bond
  misc_feature (4)..(11): Crosslink between residues
  MOD_RES (11)..(11): Alpha-Me S5-pentenyl-alanine olefin amino acid connected by an all-carbon crosslinker comprising one double bond
  MOD_RES (15)..(15): D-amino acid
  C-term NH2
LTFAEYWAQLAAHIA

SEQ ID NO: 209 - protein, 15 aa, Artificial Sequence
  Description of Artificial Sequence: Synthetic peptide
  N-term Ac
  MOD_RES (4)..(4): Alpha-Me R8-octenyl-alanine olefin amino acid connected by an all-carbon crosslinker comprising one double bond
  misc_feature (4)..(11): Crosslink between residues
  MOD_RES (11)..(11): Alpha-Me S5-pentenyl-alanine olefin amino acid connected by an all-carbon crosslinker comprising one double bond
  MOD_RES (15)..(15): D-amino acid
  C-term NH2
LTFAAYWAQLAAAFA

SEQ ID NO: 210 - protein, 15 aa, Artificial Sequence
  Description of Artificial Sequence: Synthetic peptide
  N-term Ac
  MOD_RES (4)..(4): Alpha-Me R8-octenyl-alanine olefin amino acid connected by an all-carbon crosslinker comprising one double bond
  misc_feature (4)..(11): Crosslink between residues
  MOD_RES (11)..(11): Alpha-Me S5-pentenyl-alanine olefin amino acid connected by an all-carbon crosslinker comprising one double bond
  MOD_RES (15)..(15): D-amino acid
  C-term NH2
LTFAAYWAQLAAAFA

SEQ ID NO: 211 - protein, 15 aa, Artificial Sequence
  Description of Artificial Sequence: Synthetic peptide
  N-term Ac
  MOD_RES (4)..(4): Alpha-Me R8-octenyl-alanine olefin amino acid connected by an all-carbon crosslinker comprising one double bond
  misc_feature (4)..(11): Crosslink between residues
  MOD_RES (11)..(11): Alpha-Me S5-pentenyl-alanine olefin amino acid connected by an all-carbon crosslinker comprising one double bond
  MOD_RES (15)..(15): D-amino acid
  C-term NH2
LTFAAYWAQLAAAWA

SEQ ID NO: 212 - protein, 15 aa, Artificial Sequence
  Description of Artificial Sequence: Synthetic peptide
  N-term Ac
  MOD_RES (4)..(4): Alpha-Me R8-octenyl-alanine olefin amino acid connected by an all-carbon crosslinker comprising one double bond
  misc_feature (4)..(11): Crosslink between residues
  MOD_RES (11)..(11): Alpha-Me S5-pentenyl-alanine olefin amino acid connected by an all-carbon crosslinker comprising one double bond
  MOD_RES (15)..(15): D-amino acid
  C-term NH2
LTFAAYWAQLAAAVA

SEQ ID NO: 213 - protein, 15 aa, Artificial Sequence
  Description of Artificial Sequence: Synthetic peptide
  N-term Ac
  MOD_RES (4)..(4): Alpha-Me R8-octenyl-alanine olefin amino acid connected by an all-carbon crosslinker comprising one double bond
  misc_feature (4)..(11): Crosslink between residues
  MOD_RES (11)..(11): Alpha-Me S5-pentenyl-alanine olefin amino acid connected by an all-carbon crosslinker comprising one double bond
  MOD_RES (15)..(15): D-amino acid
  C-term NH2
LTFAAYWAQLAAAVA

SEQ ID NO: 214 - protein, 15 aa, Artificial Sequence
  Description of Artificial Sequence: Synthetic peptide
  N-term Ac
  MOD_RES (4)..(4): Alpha-Me R8-octenyl-alanine olefin amino acid connected by an all-carbon crosslinker comprising one double bond
  misc_feature (4)..(11): Crosslink between residues
  MOD_RES (11)..(11): Alpha-Me S5-pentenyl-alanine olefin amino acid connected by an all-carbon crosslinker comprising one double bond
  MOD_RES (15)..(15): D-amino acid
  C-term NH2
LTFAAYWAQLAAALA

SEQ ID NO: 215 - protein, 15 aa, Artificial Sequence
  Description of Artificial Sequence: Synthetic peptide
  N-term Ac
  MOD_RES (4)..(4): Alpha-Me R8-octenyl-alanine olefin amino acid connected by an all-carbon crosslinker comprising one double bond
  misc_feature (4)..(11): Crosslink between residues
  MOD_RES (11)..(11): Alpha-Me S5-pentenyl-alanine olefin amino acid connected by an all-carbon crosslinker comprising one double bond
  MOD_RES (15)..(15): D-amino acid
  C-term NH2
LTFAAYWAQLAAALA

SEQ ID NO: 216 - protein, 15 aa, Artificial Sequence
  Description of Artificial Sequence: Synthetic peptide
  N-term Ac
  MOD_RES (4)..(4): Alpha-Me R8-octenyl-alanine olefin amino acid connected by an all-carbon crosslinker comprising one double bond
  misc_feature (4)..(11): Crosslink between residues
  MOD_RES (11)..(11): Alpha-Me S5-pentenyl-alanine olefin amino acid connected by an all-carbon crosslinker comprising one double bond
  MOD_RES (15)..(15): D-amino acid
  C-term NH2
LTFAEYWAQLAAAIA

SEQ ID NO: 217 - protein, 15 aa, Artificial Sequence
  Description of Artificial Sequence: Synthetic peptide
  N-term Ac
  MOD_RES (4)..(4): Alpha-Me R8-octenyl-alanine olefin amino acid connected by an all-carbon crosslinker comprising one double bond
  misc_feature (4)..(11): Crosslink between residues
  MOD_RES (11)..(11): Alpha-Me S5-pentenyl-alanine olefin amino acid connected by an all-carbon crosslinker comprising one double bond
  MOD_RES (15)..(15): D-amino acid
  C-term NH2
LTFAEYWAQLAAAIA

SEQ ID NO: 218 - protein, 15 aa, Artificial Sequence
  Description of Artificial Sequence: Synthetic peptide
  N-term Ac
  MOD_RES (4)..(4): Alpha-Me R8-octenyl-alanine olefin amino acid connected by an all-carbon crosslinker comprising one double bond
  misc_feature (4)..(11): Crosslink between residues
  MOD_RES (11)..(11): Alpha-Me S5-pentenyl-alanine olefin amino acid connected by an all-carbon crosslinker comprising one double bond
  MOD_RES (15)..(15): D-amino acid
  C-term NH2
LTFAEYWAQLAAAFA

SEQ ID NO: 219 - protein, 15 aa, Artificial Sequence
  Description of Artificial Sequence: Synthetic peptide
  N-term Ac
  MOD_RES (4)..(4): Alpha-Me R8-octenyl-alanine olefin amino acid connected by an all-carbon crosslinker comprising one double bond
  misc_feature (4)..(11): Crosslink between residues
  MOD_RES (11)..(11): Alpha-Me S5-pentenyl-alanine olefin amino acid connected by an all-carbon crosslinker comprising one double bond
  MOD_RES (15)..(15): D-amino acid
  C-term NH2
LTFAEYWAQLAAAFA

SEQ ID NO: 220 - protein, 15 aa, Artificial Sequence
  Description of Artificial Sequence: Synthetic peptide
  N-term Ac
  MOD_RES (4)..(4): Alpha-Me R8-octenyl-alanine olefin amino acid connected by an all-carbon crosslinker comprising one double bond
  misc_feature (4)..(11): Crosslink between residues
  MOD_RES (11)..(11): Alpha-Me S5-pentenyl-alanine olefin amino acid connected by an all-carbon crosslinker comprising one double bond
  MOD_RES (15)..(15): D-amino acid
  C-term NH2
LTFAEYWAQLAAAVA

SEQ ID NO: 221 - protein, 15 aa, Artificial Sequence
  Description of Artificial Sequence: Synthetic peptide
  N-term Ac
  MOD_RES (4)..(4): Alpha-Me R8-octenyl-alanine olefin amino acid connected by an all-carbon crosslinker comprising one double bond
  misc_feature (4)..(11): Crosslink between residues
  MOD_RES (11)..(11): Alpha-Me S5-pentenyl-alanine olefin amino acid connected by an all-carbon crosslinker comprising one double bond
  MOD_RES (15)..(15): D-amino acid
  C-term NH2
LTFAEYWAQLAAAVA

SEQ ID NO: 222 - protein, 15 aa, Artificial Sequence
  Description of Artificial Sequence: Synthetic peptide
  N-term Ac
  MOD_RES (4)..(4): Alpha-Me R8-octenyl-alanine olefin amino acid connected by an all-carbon crosslinker comprising one double bond
  misc_feature (4)..(11): Crosslink between residues
  MOD_RES (11)..(11): Alpha-Me S5-pentenyl-alanine olefin amino acid connected by an all-carbon crosslinker comprising one double bond
  MOD_RES (15)..(15): D-amino acid
  C-term NH2
LTFAEHWAQLAAAIA

SEQ ID NO: 223 - protein, 15 aa, Artificial Sequence
  Description of Artificial Sequence: Synthetic peptide
  N-term Ac
  MOD_RES (4)..(4): Alpha-Me R8-octenyl-alanine olefin amino acid connected by an all-carbon crosslinker comprising one double bond
  misc_feature (4)..(11): Crosslink between residues
  MOD_RES (11)..(11): Alpha-Me S5-pentenyl-alanine olefin amino acid connected by an all-carbon crosslinker comprising one double bond
  MOD_RES (15)..(15): D-amino acid
  C-term NH2
LTFAEHWAQLAAAIA

SEQ ID NO: 224 - protein, 15 aa, Artificial Sequence
  Description of Artificial Sequence: Synthetic peptide
  N-term Ac
  MOD_RES (4)..(4): Alpha-Me R8-octenyl-alanine olefin amino acid connected by an all-carbon crosslinker comprising one double bond
  misc_feature (4)..(11): Crosslink between residues
  MOD_RES (11)..(11): Alpha-Me S5-pentenyl-alanine olefin amino acid connected by an all-carbon crosslinker comprising one double bond
  MOD_RES (15)..(15): D-amino acid
  C-term NH2
LTFAEHWAQLAAAWA

SEQ ID NO: 225 - protein, 15 aa, Artificial Sequence
  Description of Artificial Sequence: Synthetic peptide
  N-term Ac
  MOD_RES (4)..(4): Alpha-Me R8-octenyl-alanine olefin amino acid connected by an all-carbon crosslinker comprising one double bond
  misc_feature (4)..(11): Crosslink between residues
  MOD_RES (11)..(11): Alpha-Me S5-pentenyl-alanine olefin amino acid connected by an all-carbon crosslinker comprising one double bond
  MOD_RES (15)..(15): D-amino acid
  C-term NH2
LTFAEHWAQLAAAWA

SEQ ID NO: 226 - protein, 15 aa, Artificial Sequence
  Description of Artificial Sequence: Synthetic peptide
  N-term Ac
  MOD_RES (4)..(4): Alpha-Me R8-octenyl-alanine olefin amino acid connected by an all-carbon crosslinker comprising one double bond
  misc_feature (4)..(11): Crosslink between residues
  MOD_RES (11)..(11): Alpha-Me S5-pentenyl-alanine olefin amino acid connected by an all-carbon crosslinker comprising one double bond
  MOD_RES (15)..(15): D-amino acid
  C-term NH2
LTFAEHWAQLAAALA

SEQ ID NO: 227 - protein, 15 aa, Artificial Sequence
  Description of Artificial Sequence: Synthetic peptide
  N-term Ac
  MOD_RES (4)..(4): Alpha-Me R8-octenyl-alanine olefin amino acid connected by an all-carbon crosslinker comprising one double bond
  misc_feature (4)..(11): Crosslink between residues
  MOD_RES (11)..(11): Alpha-Me S5-pentenyl-alanine olefin amino acid connected by an all-carbon crosslinker comprising one double bond
  MOD_RES (15)..(15): D-amino acid
  C-term NH2
LTFAEHWAQLAAALA

SEQ ID NO: 228 - protein, 15 aa, Artificial Sequence
  Description of Artificial Sequence: Synthetic peptide
  N-term Ac
  MOD_RES (4)..(4): Alpha-Me R8-octenyl-alanine olefin amino acid connected by an all-carbon crosslinker comprising one double bond
  misc_feature (4)..(11): Crosslink between residues
  MOD_RES (11)..(11): Alpha-Me S5-pentenyl-alanine olefin amino acid connected by an all-carbon crosslinker comprising one double bond
  MOD_RES (15)..(15): D-amino acid
  C-term NH2
ETFAEHWVQLAAALA

SEQ ID NO: 229 - protein, 15 aa, Artificial Sequence
  Description of Artificial Sequence: Synthetic peptide
  N-term Ac
  MOD_RES (4)..(4): Alpha-Me R8-octenyl-alanine olefin amino acid connected by an all-carbon crosslinker comprising one double bond
  misc_feature (4)..(11): Crosslink between residues
  MOD_RES (11)..(11): Alpha-Me S5-pentenyl-alanine olefin amino acid connected by an all-carbon crosslinker comprising one double bond
  MOD_RES (15)..(15): D-amino acid
  C-term NH2
LTFAAYWAQLAAAAA

SEQ ID NO: 230 - protein, 15 aa, Artificial Sequence
  Description of Artificial Sequence: Synthetic peptide
  N-term Ac
  MOD_RES (4)..(4): Alpha-Me R8-octenyl-alanine olefin amino acid connected by an all-carbon crosslinker comprising one double bond
  misc_feature (4)..(11): Crosslink between residues
  MOD_RES (11)..(11): Alpha-Me S5-pentenyl-alanine olefin amino acid connected by an all-carbon crosslinker comprising one double bond
  MOD_RES (15)..(15): D-amino acid
  C-term NH2
LTFAAYWAQLAAAAA

SEQ ID NO: 231 - protein, 15 aa, Artificial Sequence
  Description of Artificial Sequence: Synthetic peptide
  N-term Ac
  MOD_RES (4)..(4): Alpha-Me R8-octenyl-alanine olefin amino acid connected by an all-carbon crosslinker comprising one double bond
  misc_feature (4)..(11): Crosslink between residues
  MOD_RES (11)..(11): Alpha-Me S5-pentenyl-alanine olefin amino acid connected by an all-carbon crosslinker comprising one double bond
  MOD_RES (14)..(14): 2-aminoisobutyric acid
  C-term NH2
LTFAAYWAQLAAAXA

SEQ ID NO: 232 - protein, 15 aa, Artificial Sequence
  Description of Artificial Sequence: Synthetic peptide
  N-term Ac
  MOD_RES (4)..(4): Alpha-Me R8-octenyl-alanine olefin amino acid connected by an all-carbon crosslinker comprising one double bond
  misc_feature (4)..(11): Crosslink between residues
  MOD_RES (11)..(11): Alpha-Me S5-pentenyl-alanine olefin amino acid connected by an all-carbon crosslinker comprising one double bond
  MOD_RES (14)..(14): 2-aminoisobutyric acid
  C-term NH2
LTFAAYWAQLAAAXA

SEQ ID NO: 233 - protein, 16 aa, Artificial Sequence
  Description of Artificial Sequence: Synthetic peptide
  N-term Ac
  MOD_RES (4)..(4): Alpha-Me R8-octenyl-alanine olefin amino acid connected by an all-carbon crosslinker comprising one double bond
  misc_feature (4)..(11): Crosslink between residues
  MOD_RES (11)..(11): Alpha-Me S5-pentenyl-alanine olefin amino acid connected by an all-carbon crosslinker comprising one double bond
  MOD_RES (16)..(16): D-amino acid
  C-term NH2
LTFAAYWAQLAAAAAA

SEQ ID NO: 234 - protein, 15 aa, Artificial Sequence
  Description of Artificial Sequence: Synthetic peptide
  N-term Ac
  MOD_RES (4)..(4): Alpha-Me R5-pentenyl-alanine olefin amino acid connected by an all-carbon crosslinker comprising one double bond
  misc_feature (4)..(11): Crosslink between residues
  MOD_RES (11)..(11): Alpha-Me S8-octenyl-alanine olefin amino acid connected by an all-carbon crosslinker comprising one double bond
  MOD_RES (15)..(15): D-amino acid
  C-term NH2
LTFAAYWAQLAAAIA

SEQ ID NO: 235 - protein, 14 aa, Artificial Sequence
  Description of Artificial Sequence: Synthetic peptide
  N-term Ac
  MOD_RES (4)..(4): Alpha-Me R5-pentenyl-alanine olefin amino acid connected by an all-carbon crosslinker comprising one double bond
  misc_feature (4)..(11): Crosslink between residues
  MOD_RES (11)..(11): Alpha-Me S8-octenyl-alanine olefin amino acid connected by an all-carbon crosslinker comprising one double bond
  C-term NH2
LTFAAYWAQLASAA

SEQ ID NO: 236 - protein, 15 aa, Artificial Sequence
  Description of Artificial Sequence: Synthetic peptide
  N-term Ac
  MOD_RES (4)..(4): Alpha-Me R8-octenyl-alanine olefin amino acid connected by an all-carbon crosslinker comprising one double bond
  misc_feature (4)..(11): Crosslink between residues
  MOD_RES (10)..(10): Cyclobutyl-Ala
  MOD_RES (11)..(11): Alpha-Me S5-pentenyl-alanine olefin amino acid connected by an all-carbon crosslinker comprising one double bond
  MOD_RES (14)..(14): Norleucine
  C-term NH2
LTFAAYWAQAAAALA

SEQ ID NO: 237 - protein, 15 aa, Artificial Sequence
  Description of Artificial Sequence: Synthetic peptide
  N-term Ac
  MOD_RES (4)..(4): Alpha-Me R8-octenyl-alanine olefin amino acid connected by an all-carbon crosslinker comprising one double bond
  misc_feature (4)..(11): Crosslink between residues
  MOD_RES (10)..(10): Cyclobutyl-Ala
  MOD_RES (11)..(11): Alpha-Me S5-pentenyl-alanine olefin amino acid connected by an all-carbon crosslinker comprising one double bond
  MOD_RES (14)..(14): Norleucine
  C-term NH2
ETFAAYWAQAAAALA

SEQ ID NO: 238 - protein, 15 aa, Artificial Sequence
  Description of Artificial Sequence: Synthetic peptide
  N-term Ac
  MOD_RES (4)..(4): Alpha-Me R8-octenyl-alanine olefin amino acid connected by an all-carbon crosslinker comprising one double bond
  misc_feature (4)..(11): Crosslink between residues
  MOD_RES (10)..(10): Cyclobutyl-Ala
  MOD_RES (11)..(11): Alpha-Me S5-pentenyl-alanine olefin amino acid connected by an all-carbon crosslinker comprising one double bond
  MOD_RES (14)..(14): Norleucine
  C-term NH2
LTFAEYWAQAAAALA

SEQ ID NO: 239 - protein, 15 aa, Artificial Sequence
  Description of Artificial Sequence: Synthetic peptide
  N-term Ac
  MOD_RES (4)..(4): Alpha-Me R8-octenyl-alanine olefin amino acid connected by an all-carbon crosslinker comprising one double bond
  misc_feature (4)..(11): Crosslink between residues
  MOD_RES (10)..(10): Cyclobutyl-Ala
  MOD_RES (11)..(11): Alpha-Me S5-pentenyl-alanine olefin amino acid connected by an all-carbon crosslinker comprising one double bond
  MOD_RES (14)..(14): Norleucine
  C-term NH2
LTFAAYWAQAAAWLA

SEQ ID NO: 240 - protein, 15 aa, Artificial Sequence
  Description of Artificial Sequence: Synthetic peptide
  N-term Ac
  MOD_RES (4)..(4): Alpha-Me R8-octenyl-alanine olefin amino acid connected by an all-carbon crosslinker comprising one double bond
  misc_feature (4)..(11): Crosslink between residues
  MOD_RES (10)..(10): Cyclobutyl-Ala
  MOD_RES (11)..(11): Alpha-Me S5-pentenyl-alanine olefin amino acid connected by an all-carbon crosslinker comprising one double bond
  MOD_RES (14)..(14): Norleucine
  C-term NH2
ETFAAYWAQAAAWLA

SEQ ID NO: 241 - protein, 15 aa, Artificial Sequence
  Description of Artificial Sequence: Synthetic peptide
  N-term Ac
  MOD_RES (4)..(4): Alpha-Me R8-octenyl-alanine olefin amino acid connected by an all-carbon crosslinker comprising one double bond
  misc_feature (4)..(11): Crosslink between residues
  MOD_RES (10)..(10): Cyclobutyl-Ala
  MOD_RES (11)..(11): Alpha-Me S5-pentenyl-alanine olefin amino acid connected by an all-carbon crosslinker comprising one double bond
  MOD_RES (14)..(14): Norleucine
  C-term NH2
LTFAEYWAQAAAWLA

SEQ ID NO: 242 - protein, 15 aa, Artificial Sequence
  Description of Artificial Sequence: Synthetic peptide
  N-term Ac
  MOD_RES (4)..(4): Alpha-Me R8-octenyl-alanine olefin amino acid connected by an all-carbon crosslinker comprising one double bond
  misc_feature (4)..(11): Crosslink between residues
  MOD_RES (10)..(10): Cyclobutyl-Ala
  MOD_RES (11)..(11): Alpha-Me S5-pentenyl-alanine olefin amino acid connected by an all-carbon crosslinker comprising one double bond
  C-term NH2
LTFAEYWAQAASAFA

SEQ ID NO: 243 - protein, 15 aa, Artificial Sequence
  Description of Artificial Sequence: Synthetic peptide
  N-term Ac
  MOD_RES (3)..(3): 3,4-difluoro Phe
  MOD_RES (4)..(4): Alpha-Me R8-octenyl-alanine olefin amino acid connected by an all-carbon crosslinker comprising one double bond
  misc_feature (4)..(11): Crosslink between residues
  MOD_RES (10)..(10): Cyclobutyl-Ala
  MOD_RES (11)..(11): Alpha-Me S5-pentenyl-alanine olefin amino acid connected by an all-carbon crosslinker comprising one double bond
  MOD_RES (14)..(14): Norleucine
  C-term NH2
LTFAEYWAQAASALA

SEQ ID NO: 244 - protein, 15 aa, Artificial Sequence
  Description of Artificial Sequence: Synthetic peptide
  N-term Ac
  MOD_RES (4)..(4): Alpha-Me R8-octenyl-alanine olefin amino acid connected by an all-carbon crosslinker comprising one double bond
  misc_feature (4)..(11): Crosslink between residues
  MOD_RES (6)..(6): 4-carboxy Phe
  MOD_RES (10)..(10): Cyclobutyl-Ala
  MOD_RES (11)..(11): Alpha-Me S5-pentenyl-alanine olefin amino acid connected by an all-carbon crosslinker comprising one double bond
  MOD_RES (14)..(14): Norleucine
  C-term NH2
LTFAEFWAQAASALA

SEQ ID NO: 245 - protein, 15 aa, Artificial Sequence
  Description of Artificial Sequence: Synthetic peptide
  N-term Ac
  MOD_RES (4)..(4): Alpha-Me R8-octenyl-alanine olefin amino acid connected by an all-carbon crosslinker comprising one double bond
  misc_feature (4)..(11): Crosslink between residues
  MOD_RES (10)..(10): Cyclobutyl-Ala
  MOD_RES (11)..(11): Alpha-Me S5-pentenyl-alanine olefin amino acid connected by an all-carbon crosslinker comprising one double bond
  MOD_RES (14)..(14): Norleucine
  C-term NH2
LTFAEYWSQAASALA

SEQ ID NO: 246 - protein, 15 aa, Artificial Sequence
  Description of Artificial Sequence: Synthetic peptide
  N-term Ac
  MOD_RES (4)..(4): Alpha-Me R8-octenyl-alanine olefin amino acid connected by an all-carbon crosslinker comprising one double bond
  misc_feature (4)..(11): Crosslink between residues
  MOD_RES (10)..(10): Cyclobutyl-Ala
  MOD_RES (11)..(11): Alpha-Me S5-pentenyl-alanine olefin amino acid connected by an all-carbon crosslinker comprising one double bond
  MOD_RES (14)..(14): Norleucine
  C-term NH2
LTFAEYWWQAASALA

SEQ ID NO: 247 - protein, 15 aa, Artificial Sequence
  Description of Artificial Sequence: Synthetic peptide
  N-term Ac
  MOD_RES (4)..(4): Alpha-Me R8-octenyl-alanine olefin amino acid connected by an all-carbon crosslinker comprising one double bond
  misc_feature (4)..(11): Crosslink between residues
  MOD_RES (10)..(10): Cyclobutyl-Ala
  MOD_RES (11)..(11): Alpha-Me S5-pentenyl-alanine olefin amino acid connected by an all-carbon crosslinker comprising one double bond
  MOD_RES (15)..(15): D-amino acid
  C-term NH2
LTFAEYWAQAAAAIA

SEQ ID NO: 248 - protein, 15 aa, Artificial Sequence
  Description of Artificial Sequence: Synthetic peptide
  N-term Ac
  MOD_RES (3)..(3): 3,4-difluoro Phe
  MOD_RES (4)..(4): Alpha-Me R8-octenyl-alanine olefin amino acid connected by an all-carbon crosslinker comprising one double bond
  misc_feature (4)..(11): Crosslink between residues
  MOD_RES (10)..(10): Cyclobutyl-Ala
  MOD_RES (11)..(11): Alpha-Me S5-pentenyl-alanine olefin amino acid connected by an all-carbon crosslinker comprising one double bond
  MOD_RES (15)..(15): D-amino acid
  C-term NH2
LTFAEYWAQAAAAIA

SEQ ID NO: 249 - protein, 15 aa, Artificial Sequence
  Description of Artificial Sequence: Synthetic peptide
  N-term Ac
  MOD_RES (4)..(4): Alpha-Me R8-octenyl-alanine olefin amino acid connected by an all-carbon crosslinker comprising one double bond
  misc_feature (4)..(11): Crosslink between residues
  MOD_RES (6)..(6): 4-carboxy Phe
  MOD_RES (10)..(10): Cyclobutyl-Ala
  MOD_RES (11)..(11): Alpha-Me S5-pentenyl-alanine olefin amino acid connected by an all-carbon crosslinker comprising one double bond
  MOD_RES (15)..(15): D-amino acid
  C-term NH2
LTFAEFWAQAAAAIA

SEQ ID NO: 250 - protein, 14 aa, Artificial Sequence
  Description of Artificial Sequence: Synthetic peptide
  N-term Pam
  MOD_RES (4)..(4): Alpha-Me R8-octenyl-alanine olefin amino acid connected by an all-carbon crosslinker comprising one double bond
  misc_feature (4)..(11): Crosslink between residues
  MOD_RES (10)..(10): Cyclobutyl-Ala
  MOD_RES (11)..(11): Alpha-Me S5-pentenyl-alanine olefin amino acid connected by an all-carbon crosslinker comprising one double bond
  C-term NH2
ETFAEYWAQAASAA

SEQ ID NO: 251 - protein, 14 aa, Artificial Sequence
  Description of Artificial Sequence: Synthetic peptide
  N-term Ac
  MOD_RES (3)..(3): homo-Phe
  MOD_RES (4)..(4): Alpha-Me R8-octenyl-alanine olefin amino acid connected by an all-carbon crosslinker comprising one double bond
  misc_feature (4)..(11): Crosslink between residues
  MOD_RES (10)..(10): Cyclobutyl-Ala
  MOD_RES (11)..(11): Alpha-Me S5-pentenyl-alanine olefin amino acid connected by an all-carbon crosslinker comprising one double bond
  C-term NH2
LTFAEFWAQAASAA

SEQ ID NO: 252 - protein, 14 aa, Artificial Sequence
  Description of Artificial Sequence: Synthetic peptide
  N-term Ac
  MOD_RES (4)..(4): Alpha-Me R8-octenyl-alanine olefin amino acid connected by an all-carbon crosslinker comprising one double bond
  misc_feature (4)..(11): Crosslink between residues
  MOD_RES (10)..(10): Cyclobutyl-Ala
  MOD_RES (11)..(11): Alpha-Me S5-pentenyl-alanine olefin amino acid connected by an all-carbon crosslinker comprising one double bond
  C-term NH2
LTAAEYWAQAASAA

SEQ ID NO: 253 - protein, 14 aa, Artificial Sequence
  Description of Artificial Sequence: Synthetic peptide
  N-term Ac
  MOD_RES (4)..(4): Alpha-Me R8-octenyl-alanine olefin amino acid connected by an all-carbon crosslinker comprising one double bond
  misc_feature (4)..(11): Crosslink between residues
  MOD_RES (10)..(10): Cyclobutyl-Ala
  MOD_RES (11)..(11): Alpha-Me S5-pentenyl-alanine olefin amino acid connected by an all-carbon crosslinker comprising one double bond
  C-term NH2
LTFAEYAAQAASAA

SEQ ID NO: 254 - protein, 14 aa, Artificial Sequence
  Description of Artificial Sequence: Synthetic peptide
  N-term Ac
  MOD_RES (4)..(4): Alpha-Me R8-octenyl-alanine olefin amino acid connected by an all-carbon crosslinker comprising one double bond
  misc_feature (4)..(11): Crosslink between residues
  MOD_RES (7)..(7): 2-Naphthalanine
  MOD_RES (10)..(10): Cyclobutyl-Ala
  MOD_RES (11)..(11): Alpha-Me S5-pentenyl-alanine olefin amino acid connected by an all-carbon crosslinker comprising one double bond
  C-term NH2
LTFAEYAAQAASAA

SEQ ID NO: 255 - protein, 14 aa, Artificial Sequence
  Description of Artificial Sequence: Synthetic peptide
  N-term Ac
  MOD_RES (4)..(4): Alpha-Me R8-octenyl-alanine olefin amino acid connected by an all-carbon crosslinker comprising one double bond
  misc_feature (4)..(11): Crosslink between residues
  MOD_RES (10)..(10): Cyclobutyl-Ala
  MOD_RES (11)..(11): Alpha-Me S5-pentenyl-alanine olefin amino acid connected by an all-carbon crosslinker comprising one double bond
  C-term NH2
LTFAAYWAQAASAA

SEQ ID NO: 256 - protein, 14 aa, Artificial Sequence
  Description of Artificial Sequence: Synthetic peptide
  N-term Ac
  MOD_RES (4)..(4): Alpha-Me R8-octenyl-alanine olefin amino acid connected by an all-carbon crosslinker comprising one double bond
  misc_feature (4)..(11): Crosslink between residues
  MOD_RES (10)..(10): Cyclobutyl-Ala
  MOD_RES (11)..(11): Alpha-Me S5-pentenyl-alanine olefin amino acid connected by an all-carbon crosslinker comprising one double bond
  C-term NH2
LTFAEYWAQAASAF

SEQ ID NO: 257 - protein, 15 aa, Artificial Sequence
  Description of Artificial Sequence: Synthetic peptide
  N-term Ac
  MOD_RES (4)..(4): Alpha-Me R8-octenyl-alanine olefin amino acid connected by an all-carbon crosslinker comprising one double bond
  misc_feature (4)..(11): Crosslink between residues
  MOD_RES (10)..(10): Cyclobutyl-Ala
  MOD_RES (11)..(11): Alpha-Me S5-pentenyl-alanine olefin amino acid connected by an all-carbon crosslinker comprising one double bond
  MOD_RES (15)..(15): D-amino acid
  C-term NH2
LTFAEYWAQAASAFA

SEQ ID NO: 258 - protein, 14 aa, Artificial Sequence
  Description of Artificial Sequence: Synthetic peptide
  N-term Ac
  MOD_RES (4)..(4): Alpha-Me R8-octenyl-alanine olefin amino acid connected by an all-carbon crosslinker comprising one double bond
  misc_feature (4)..(11): Crosslink between residues
  MOD_RES (10)..(10): Cyclobutyl-Ala
  MOD_RES (11)..(11): Alpha-Me S5-pentenyl-alanine olefin amino acid connected by an all-carbon crosslinker comprising one double bond
  C-term NH2
LTFAAYWAQAASAF

SEQ ID NO: 259 - protein, 14 aa, Artificial Sequence
  Description of Artificial Sequence: Synthetic peptide
  N-term Ac
  MOD_RES (3)..(3): 3,4-difluoro Phe
  MOD_RES (4)..(4): Alpha-Me R8-octenyl-alanine olefin amino acid connected by an all-carbon crosslinker comprising one double bond
  misc_feature (4)..(11): Crosslink between residues
  MOD_RES (10)..(10): Cyclobutyl-Ala
  MOD_RES (11)..(11): Alpha-Me S5-pentenyl-alanine olefin amino acid connected by an all-carbon crosslinker comprising one double bond
  C-term NH2
LTFAAYWAQAASAF

SEQ ID NO: 260 - protein, 14 aa, Artificial Sequence
  Description of Artificial Sequence: Synthetic peptide
  N-term Ac
  MOD_RES (4)..(4): Alpha-Me R8-octenyl-alanine olefin amino acid connected by an all-carbon crosslinker comprising one double bond
  misc_feature (4)..(11): Crosslink between residues
  MOD_RES (6)..(6): 4-carboxy Phe
  MOD_RES (10)..(10): Cyclobutyl-Ala
  MOD_RES (11)..(11): Alpha-Me S5-pentenyl-alanine olefin amino acid connected by an all-carbon crosslinker comprising one double bond
  C-term NH2
LTFAAFWAQAASAF

SEQ ID NO: 261 - protein, 14 aa, Artificial Sequence
  Description of Artificial Sequence: Synthetic peptide
  N-term Ac
  MOD_RES (4)..(4): Alpha-Me R8-octenyl-alanine olefin amino acid connected by an all-carbon crosslinker comprising one double bond
  misc_feature (4)..(11): Crosslink between residues
  MOD_RES (7)..(7): 6cl-Trp
  MOD_RES (10)..(10): Cyclobutyl-Ala
  MOD_RES (11)..(11): Alpha-Me S5-pentenyl-alanine olefin amino acid connected by an all-carbon crosslinker comprising one double bond
  C-term NH2
LTFAEYWAQAASAF

SEQ ID NO: 262 - protein, 14 aa, Artificial Sequence
  Description of Artificial Sequence: Synthetic peptide
  N-term Ac
  MOD_RES (4)..(4): Alpha-Me R8-octenyl-alanine olefin amino acid connected by an all-carbon crosslinker comprising one double bond
  misc_feature (4)..(11): Crosslink between residues
  MOD_RES (10)..(10): Cyclobutyl-Ala
  MOD_RES (11)..(11): Alpha-Me S5-pentenyl-alanine olefin amino acid connected by an all-carbon crosslinker comprising one double bond
  C-term NH2
LTFAAYWSQAASAF

SEQ ID NO: 263 - protein, 14 aa, Artificial Sequence
  Description of Artificial Sequence: Synthetic peptide
  N-term Ac
  MOD_RES (4)..(4): Alpha-Me R8-octenyl-alanine olefin amino acid connected by an all-carbon crosslinker comprising one double bond
  misc_feature (4)..(11): Crosslink between residues
  MOD_RES (10)..(10): Cyclobutyl-Ala
  MOD_RES (11)..(11): Alpha-Me S5-pentenyl-alanine olefin amino acid connected by an all-carbon crosslinker comprising one double bond
  C-term NH2
LTFAAYWWQAASAF

SEQ ID NO: 264 - protein, 15 aa, Artificial Sequence
  Description of Artificial Sequence: Synthetic peptide
  N-term Ac
  MOD_RES (4)..(4): Alpha-Me R8-octenyl-alanine olefin amino acid connected by an all-carbon crosslinker comprising one double bond
  misc_feature (4)..(11): Crosslink between residues
  MOD_RES (10)..(10): Cyclobutyl-Ala
  MOD_RES (11)..(11): Alpha-Me S5-pentenyl-alanine olefin amino acid connected by an all-carbon crosslinker comprising one double bond
  MOD_RES (15)..(15): D-amino acid
  C-term NH2
LTFAAYWAQAAAAIA

SEQ ID NO: 265 - protein, 15 aa, Artificial Sequence
  Description of Artificial Sequence: Synthetic peptide
  N-term Ac
  MOD_RES (3)..(3): 3,4-difluoro Phe
  MOD_RES (4)..(4): Alpha-Me R8-octenyl-alanine olefin amino acid connected by an all-carbon crosslinker comprising one double bond
  misc_feature (4)..(11): Crosslink between residues
  MOD_RES (10)..(10): Cyclobutyl-Ala
  MOD_RES (11)..(11): Alpha-Me S5-pentenyl-alanine olefin amino acid connected by an all-carbon crosslinker comprising one double bond
  MOD_RES (15)..(15): D-amino acid
  C-term NH2
LTFAAYWAQAAAAIA

SEQ ID NO: 266 - protein, 15 aa, Artificial Sequence
  Description of Artificial Sequence: Synthetic peptide
  N-term Ac
  MOD_RES (4)..(4): Alpha-Me R8-octenyl-alanine olefin amino acid connected by an all-carbon crosslinker comprising one double bond
  misc_feature (4)..(11): Crosslink between residues
  MOD_RES (7)..(7): 6cl-Trp
  MOD_RES (10)..(10): Cyclobutyl-Ala
  MOD_RES (11)..(11): Alpha-Me S5-pentenyl-alanine olefin amino acid connected by an all-carbon crosslinker comprising one double bond
  MOD_RES (15)..(15): D-amino acid
  C-term NH2
LTFAAYWAQAAAAIA

SEQ ID NO: 267 - protein, 15 aa, Artificial Sequence
  Description of Artificial Sequence: Synthetic peptide
  N-term Ac
  MOD_RES (4)..(4): Alpha-Me R8-octenyl-alanine olefin amino acid connected by an all-carbon crosslinker comprising one double bond
  misc_feature (4)..(11): Crosslink between residues
  MOD_RES (6)..(6): 4-carboxy Phe
  MOD_RES (10)..(10): Cyclobutyl-Ala
  MOD_RES (11)..(11): Alpha-Me S5-pentenyl-alanine olefin amino acid connected by an all-carbon crosslinker comprising one double bond
  MOD_RES (15)..(15): D-amino acid
  C-term NH2
LTFAAFWAQAAAAIA

SEQ ID NO: 268 - protein, 15 aa, Artificial Sequence
  Description of Artificial Sequence: Synthetic peptide
  N-term Ac
  MOD_RES (4)..(4): Alpha-Me R8-octenyl-alanine olefin amino acid connected by an all-carbon crosslinker comprising one double bond
  misc_feature (4)..(11): Crosslink between residues
  MOD_RES (10)..(10): Cyclobutyl-Ala
  MOD_RES (11)..(11): Alpha-Me S5-pentenyl-alanine olefin amino acid connected by an all-carbon crosslinker comprising one double bond
  MOD_RES (15)..(15): D-amino acid
  C-term NH2
LTFAEYWAQAAAAFA

SEQ ID NO: 269 - protein, 15 aa, Artificial Sequence
  Description of Artificial Sequence: Synthetic peptide
  N-term Ac
  MOD_RES (4)..(4): Alpha-Me R8-octenyl-alanine olefin amino acid connected by an all-carbon crosslinker comprising one double bond
  misc_feature (4)..(11): Crosslink between residues
  MOD_RES (10)..(10): Cyclobutyl-Ala
  MOD_RES (11)..(11): Alpha-Me S5-pentenyl-alanine olefin amino acid connected by an all-carbon crosslinker comprising one double bond
  MOD_RES (15)..(15): D-amino acid
  C-term NH2
LTFAEYWAQAAAAFA

SEQ ID NO: 270 - protein, 15 aa, Artificial Sequence
  Description of Artificial Sequence: Synthetic peptide
  N-term Ac
  MOD_RES (4)..(4): Alpha-Me R8-octenyl-alanine olefin amino acid connected by an all-carbon crosslinker comprising one double bond
  misc_feature (4)..(11): Crosslink between residues
  MOD_RES (10)..(10): Cyclobutyl-Ala
  MOD_RES (11)..(11): Alpha-Me S5-pentenyl-alanine olefin amino acid connected by an all-carbon crosslinker comprising one double bond
  MOD_RES (14)..(14): Norleucine
  MOD_RES (15)..(15): D-amino acid
  C-term NH2
ETFAAYWAQAAAWLA

SEQ ID NO: 271 - protein, 15 aa, Artificial Sequence
  Description of Artificial Sequence: Synthetic peptide
  N-term Ac
  MOD_RES (4)..(4): Alpha-Me R8-octenyl-alanine olefin amino acid connected by an all-carbon crosslinker comprising one double bond
  misc_feature (4)..(11): Crosslink between residues
  MOD_RES (10)..(10): Cyclobutyl-Ala
  MOD_RES (11)..(11): Alpha-Me S5-pentenyl-alanine olefin amino acid connected by an all-carbon crosslinker comprising one double bond
  MOD_RES (14)..(14): Norleucine
  MOD_RES (15)..(15): D-amino acid
  C-term NH2
LTFAEYWAQAAAWLA

SEQ ID NO: 272 - protein, 15 aa, Artificial Sequence
  Description of Artificial Sequence: Synthetic peptide
  N-term Ac
  MOD_RES (4)..(4): Alpha-Me R8-octenyl-alanine olefin amino acid connected by an all-carbon crosslinker comprising one double bond
  misc_feature (4)..(11): Crosslink between residues
  MOD_RES (10)..(10): Cyclobutyl-Ala
  MOD_RES (11)..(11): Alpha-Me S5-pentenyl-alanine olefin amino acid connected by an all-carbon crosslinker comprising one double bond
  MOD_RES (14)..(14): Norleucine
  MOD_RES (15)..(15): D-amino acid
  C-term NH2
ETFAEYWAQAAAWLA

SEQ ID NO: 273 - protein, 15 aa, Artificial Sequence
  Description of Artificial Sequence: Synthetic peptide
  N-term Ac
  MOD_RES (4)..(4): Alpha-Me R8-octenyl-alanine olefin amino acid connected by an all-carbon crosslinker comprising one double bond
  misc_feature (4)..(11): Crosslink between residues
  MOD_RES (10)..(10): Cyclobutyl-Ala
  MOD_RES (11)..(11): Alpha-Me S5-pentenyl-alanine olefin amino acid connected by an all-carbon crosslinker comprising one double bond
  MOD_RES (14)..(14): Norleucine
  MOD_RES (15)..(15): D-amino acid
  C-term NH2
ETFAEYWAQAAAWLA

SEQ ID NO: 274 - protein, 15 aa, Artificial Sequence
  Description of Artificial Sequence: Synthetic peptide
  N-term Ac
  MOD_RES (4)..(4): Alpha-Me R8-octenyl-alanine olefin amino acid connected by an all-carbon crosslinker comprising one double bond
  misc_feature (4)..(11): Crosslink between residues
  MOD_RES (10)..(10): Cyclobutyl-Ala
  MOD_RES (11)..(11): Alpha-Me S5-pentenyl-alanine olefin amino acid connected by an all-carbon crosslinker comprising one double bond
  MOD_RES (15)..(15): D-amino acid
  C-term NH2
LTFAAYWAQAASAFA

SEQ ID NO: 275 - protein, 15 aa, Artificial Sequence
  Description of Artificial Sequence: Synthetic peptide
  N-term Ac
  MOD_RES (4)..(4): Alpha-Me R8-octenyl-alanine olefin amino acid connected by an all-carbon crosslinker comprising one double bond
  misc_feature (4)..(11): Crosslink between residues
  MOD_RES (10)..(10): Cyclobutyl-Ala
  MOD_RES (11)..(11): Alpha-Me S5-pentenyl-alanine olefin amino acid connected by an all-carbon crosslinker comprising one double bond
  MOD_RES (15)..(15): D-amino acid
  C-term NH2
LTFAAYWAQAASAFA

SEQ ID NO: 276 - protein, 15 aa, Artificial Sequence
  Description of Artificial Sequence: Synthetic peptide
  N-term Ac
  MOD_RES (4)..(4): Alpha-Me R8-octenyl-alanine olefin amino acid connected by an all-carbon crosslinker comprising one double bond
  misc_feature (4)..(11): Crosslink between residues
  MOD_RES (11)..(11): Alpha-Me S5-pentenyl-alanine olefin amino acid connected by an all-carbon crosslinker comprising one double bond
  MOD_RES (14)..(14): Norleucine
  MOD_RES (15)..(15): D-amino acid
  C-term NH2
ETFAAYWAQLAAWLA

SEQ ID NO: 277 - protein, 15 aa, Artificial Sequence
  Description of Artificial Sequence: Synthetic peptide
  N-term Ac
  MOD_RES (4)..(4): Alpha-Me R8-octenyl-alanine olefin amino acid connected by an all-carbon crosslinker comprising one double bond
  misc_feature (4)..(11): Crosslink between residues
  MOD_RES (11)..(11): Alpha-Me S5-pentenyl-alanine olefin amino acid connected by an all-carbon crosslinker comprising one double bond
  MOD_RES (14)..(14): Norleucine
  MOD_RES (15)..(15): D-amino acid
  C-term NH2
LTFAEYWAQLAAWLA

SEQ ID NO: 278 - protein, 15 aa, Artificial Sequence
  Description of Artificial Sequence: Synthetic peptide
  N-term Ac
  MOD_RES (4)..(4): Alpha-Me R8-octenyl-alanine olefin amino acid connected by an all-carbon crosslinker comprising one double bond
  misc_feature (4)..(11): Crosslink between residues
  MOD_RES (11)..(11): Alpha-Me S5-pentenyl-alanine olefin amino acid connected by an all-carbon crosslinker comprising one double bond
  MOD_RES (14)..(14): Norleucine
  MOD_RES (15)..(15): D-amino acid
  C-term NH2
ETFAEYWAQLAAWLA

SEQ ID NO: 279 - protein, 14 aa, Artificial Sequence
  Description of Artificial Sequence: Synthetic peptide
  N-term Dmaac
  MOD_RES (4)..(4): Alpha-Me R8-octenyl-alanine olefin amino acid connected by an all-carbon crosslinker comprising one double bond
  misc_feature (4)..(11): Crosslink between residues
  MOD_RES (10)..(10): hLeu
  MOD_RES (11)..(11): Alpha-Me S5-pentenyl-alanine olefin amino acid connected by an all-carbon crosslinker comprising one double bond
  C-term NH2
LTFAEYWAQLASAA

SEQ ID NO: 280 - protein, 14 aa, Artificial Sequence
  Description of Artificial Sequence: Synthetic peptide
  N-term Hexac
  MOD_RES (4)..(4): Alpha-Me R8-octenyl-alanine olefin amino acid connected by an all-carbon crosslinker comprising one double bond
  misc_feature (4)..(11): Crosslink between residues
  MOD_RES (10)..(10): hLeu
  MOD_RES (11)..(11): Alpha-Me S5-pentenyl-alanine olefin amino acid connected by an all-carbon crosslinker comprising one double bond
  C-term NH2
LTFAEYWAQLASAA

SEQ ID NO: 281 - protein, 14 aa, Artificial Sequence
  Description of Artificial Sequence: Synthetic peptide
  N-term Napac
  MOD_RES (4)..(4): Alpha-Me R8-octenyl-alanine olefin amino acid connected by an all-carbon crosslinker comprising one double bond
  misc_feature (4)..(11): Crosslink between residues
  MOD_RES (10)..(10): hLeu
  MOD_RES (11)..(11): Alpha-Me S5-pentenyl-alanine olefin amino acid connected by an all-carbon crosslinker comprising one double bond
  C-term NH2
LTFAEYWAQLASAA

SEQ ID NO: 282 - protein, 14 aa, Artificial Sequence
  Description of Artificial Sequence: Synthetic peptide
  N-term Decac
  MOD_RES (4)..(4): Alpha-Me R8-octenyl-alanine olefin amino acid connected by an all-carbon crosslinker comprising one double bond
  misc_feature (4)..(11): Crosslink between residues
  MOD_RES (10)..(10): hLeu
  MOD_RES (11)..(11): Alpha-Me S5-pentenyl-alanine olefin amino acid connected by an all-carbon crosslinker comprising one double bond
  C-term NH2
LTFAEYWAQLASAA

SEQ ID NO: 283 - protein, 14 aa, Artificial Sequence
  Description of Artificial Sequence: Synthetic peptide
  N-term Admac
  MOD_RES (4)..(4): Alpha-Me R8-octenyl-alanine olefin amino acid connected by an all-carbon crosslinker comprising one double bond
  misc_feature (4)..(11): Crosslink between residues
  MOD_RES (10)..(10): hLeu
  MOD_RES (11)..(11): Alpha-Me S5-pentenyl-alanine olefin amino acid connected by an all-carbon crosslinker comprising one double bond
  C-term NH2
LTFAEYWAQLASAA

SEQ ID NO: 284 - protein, 14 aa, Artificial Sequence
  Description of Artificial Sequence: Synthetic peptide
  N-term Tmac
  MOD_RES (4)..(4): Alpha-Me R8-octenyl-alanine olefin amino acid connected by an all-carbon crosslinker comprising one double bond
  misc_feature (4)..(11): Crosslink between residues
  MOD_RES (10)..(10): hLeu
  MOD_RES (11)..(11): Alpha-Me S5-pentenyl-alanine olefin amino acid connected by an all-carbon crosslinker comprising one double bond
  C-term NH2
LTFAEYWAQLASAA

SEQ ID NO: 285 - protein, 14 aa, Artificial Sequence
  Description of Artificial Sequence: Synthetic peptide
  N-term Pam
  MOD_RES (4)..(4): Alpha-Me R8-octenyl-alanine olefin amino acid connected by an all-carbon crosslinker comprising one double bond
  misc_feature (4)..(11): Crosslink between residues
  MOD_RES (10)..(10): hLeu
  MOD_RES (11)..(11): Alpha-Me S5-pentenyl-alanine olefin amino acid connected by an all-carbon crosslinker comprising one double bond
  C-term NH2
LTFAEYWAQLASAA

SEQ ID NO: 286 - protein, 15 aa, Artificial Sequence
  Description of Artificial Sequence: Synthetic peptide
  N-term Ac
  MOD_RES (4)..(4): Alpha-Me R8-octenyl-alanine olefin amino acid connected by an all-carbon crosslinker comprising one double bond
  misc_feature (4)..(11): Crosslink between residues
  MOD_RES (10)..(10): Cyclobutyl-Ala
  MOD_RES (11)..(11): Alpha-Me S5-pentenyl-alanine olefin amino acid connected by an all-carbon crosslinker comprising one double bond
  MOD_RES (14)..(14): Norleucine
  C-term NH2
LTFAAYWAQAAAALA

SEQ ID NO: 287 - protein, 15 aa, Artificial Sequence
  Description of Artificial Sequence: Synthetic peptide
  N-term Ac
  MOD_RES (3)..(3): 3,4-difluoro Phe
  MOD_RES (4)..(4): Alpha-Me R8-octenyl-alanine olefin amino acid connected by an all-carbon crosslinker comprising one double bond
  misc_feature (4)..(11): Crosslink between residues
  MOD_RES (10)..(10): Cyclobutyl-Ala
  MOD_RES (11)..(11): Alpha-Me S5-pentenyl-alanine olefin amino acid connected by an all-carbon crosslinker comprising one double bond
  MOD_RES (15)..(15): D-amino acid
  C-term NH2
LTFAEYWAQAAAAIA

SEQ ID NO: 288 - protein, 14 aa, Artificial Sequence
  Description of Artificial Sequence: Synthetic peptide
  N-term Ac
  MOD_RES (3)..(3): 3,4-difluoro Phe
  MOD_RES (4)..(4): Alpha-Me R8-octenyl-alanine olefin amino acid connected by an all-carbon crosslinker comprising one double bond
  misc_feature (4)..(11): Crosslink between residues
  MOD_RES (10)..(10): Cyclobutyl-Ala
  MOD_RES (11)..(11): Alpha-Me S5-pentenyl-alanine olefin amino acid connected by an all-carbon crosslinker comprising one double bond
  C-term NH2
LTFAEYWAQAASAA

SEQ ID NO: 289 - protein, 14 aa, Artificial Sequence
  Description of Artificial Sequence: Synthetic peptide
  N-term Ac
  MOD_RES (3)..(3): 3,4-difluoro Phe
  MOD_RES (4)..(4): Alpha-Me R8-octenyl-alanine olefin amino acid connected by an all-carbon crosslinker comprising one double bond
  misc_feature (4)..(11): Crosslink between residues
  MOD_RES (10)..(10): Cyclobutyl-Ala
  MOD_RES (11)..(11): Alpha-Me S5-pentenyl-alanine olefin amino acid connected by an all-carbon crosslinker comprising one double bond
  C-term NH2
LTFAEYWAQAASAA

SEQ ID NO: 290 - protein, 14 aa, Artificial Sequence
  Description of Artificial Sequence: Synthetic peptide
  N-term Ac
  MOD_RES (4)..(4): Alpha-Me R8-octenyl-alanine olefin amino acid connected by an all-carbon crosslinker comprising one double bond
  misc_feature (4)..(11): Crosslink between residues
  MOD_RES (6)..(6): 4-carboxy Phe
  MOD_RES (10)..(10): Cyclobutyl-Ala
  MOD_RES (11)..(11): Alpha-Me S5-pentenyl-alanine olefin amino acid connected by an all-carbon crosslinker comprising one double bond
  C-term NH2
LTFAEFWAQAASAA

SEQ ID NO: 291 - protein, 14 aa, Artificial Sequence
  Description of Artificial Sequence: Synthetic peptide
  N-term Ac
  MOD_RES (4)..(4): Alpha-Me R8-octenyl-alanine olefin amino acid connected by an all-carbon crosslinker comprising one double bond
  misc_feature (4)..(11): Crosslink between residues
  MOD_RES (6)..(6): 4-carboxy Phe
  MOD_RES (10)..(10): Cyclobutyl-Ala
  MOD_RES (11)..(11): Alpha-Me S5-pentenyl-alanine olefin amino acid connected by an all-carbon crosslinker comprising one double bond
  C-term NH2
LTFAEFWAQAASAA

SEQ ID NO: 292 - protein, 14 aa, Artificial Sequence
  Description of Artificial Sequence: Synthetic peptide
  N-term Ac
  MOD_RES (4)..(4): Alpha-Me R8-octenyl-alanine olefin amino acid connected by an all-carbon crosslinker comprising one double bond
  misc_feature (4)..(11): Crosslink between residues
  MOD_RES (10)..(10): Cyclobutyl-Ala
  MOD_RES (11)..(11): Alpha-Me S5-pentenyl-alanine olefin amino acid connected by an all-carbon crosslinker comprising one double bond
  C-term NH2
LTFAEYWSQAASAA

SEQ ID NO: 293 - protein, 14 aa, Artificial Sequence
  Description of Artificial Sequence: Synthetic peptide
  N-term Ac
  MOD_RES (4)..(4): Alpha-Me R8-octenyl-alanine olefin amino acid connected by an all-carbon crosslinker comprising one double bond
  misc_feature (4)..(11): Crosslink between residues
  MOD_RES (10)..(10): Cyclobutyl-Ala
  MOD_RES (11)..(11): Alpha-Me S5-pentenyl-alanine olefin amino acid connected by an all-carbon crosslinker comprising one double bond
  C-term NH2
LTFAEYWSQAASAA

SEQ ID NO: 294 - protein, 14 aa, Artificial Sequence
  Description of Artificial Sequence: Synthetic peptide
  N-term Ac
  MOD_RES (4)..(4): Alpha-Me R8-octenyl-alanine olefin amino acid connected by an all-carbon crosslinker comprising one double bond
  misc_feature (4)..(11): Crosslink between residues
  MOD_RES (10)..(10): hLeu
  MOD_RES (11)..(11): Alpha-Me S5-pentenyl-alanine olefin amino acid connected by an all-carbon crosslinker comprising one double bond
  C-term NH2
LTFAEYWAQLASAA

SEQ ID NO: 295 - protein, 14 aa, Artificial Sequence
  Description of Artificial Sequence: Synthetic peptide
  N-term Ac
  MOD_RES (4)..(4): Alpha-Me R8-octenyl-alanine olefin amino acid connected by an all-carbon crosslinker comprising one double bond
  misc_feature (4)..(11): Crosslink between residues
  MOD_RES (10)..(10): hLeu
  MOD_RES (11)..(11): Alpha-Me S5-pentenyl-alanine olefin amino acid connected by an all-carbon crosslinker comprising one double bond
  C-term NH2
LTFAAYWAQLASAF

SEQ ID NO: 296 - protein, 14 aa, Artificial Sequence
  Description of Artificial Sequence: Synthetic peptide
  N-term Ac
  MOD_RES (4)..(4): Alpha-Me R8-octenyl-alanine olefin amino acid connected by an all-carbon crosslinker comprising one double bond
  misc_feature (4)..(11): Crosslink between residues
  MOD_RES (10)..(10): hLeu
  MOD_RES (11)..(11): Alpha-Me S5-pentenyl-alanine olefin amino acid connected by an all-carbon crosslinker comprising one double bond
  C-term NH2
LTFAAYWAQLASAF

SEQ ID NO: 297 - protein, 14 aa, Artificial Sequence
  Description of Artificial Sequence: Synthetic peptide
  N-term Ac
  MOD_RES (3)..(3): 3,4-difluoro Phe
  MOD_RES (4)..(4): Alpha-Me R8-octenyl-alanine olefin amino acid connected by an all-carbon crosslinker comprising one double bond
  misc_feature (4)..(11): Crosslink between residues
  MOD_RES (10)..(10): hLeu
  MOD_RES (11)..(11): Alpha-Me S5-pentenyl-alanine olefin amino acid connected by an all-carbon crosslinker comprising one double bond
  C-term NH2
LTFAAYWAQLASAA

SEQ ID NO: 298 - protein, 14 aa, Artificial Sequence
  Description of Artificial Sequence: Synthetic peptide
  N-term Ac
  MOD_RES (3)..(3): 3,4-difluoro Phe
  MOD_RES (4)..(4): Alpha-Me R8-octenyl-alanine olefin amino acid connected by an all-carbon crosslinker comprising one double bond
  misc_feature (4)..(11): Crosslink between residues
  MOD_RES (10)..(10): hLeu
  MOD_RES (11)..(11): Alpha-Me S5-pentenyl-alanine olefin amino acid connected by an all-carbon crosslinker comprising one double bond
  C-term NH2
LTFAAYWAQLASAA

SEQ ID NO: 299 - protein, 14 aa, Artificial Sequence
  Description of Artificial Sequence: Synthetic peptide
  N-term Ac
  MOD_RES (4)..(4): Alpha-Me R8-octenyl-alanine olefin amino acid connected by an all-carbon crosslinker comprising one double bond
  misc_feature (4)..(11): Crosslink between residues
  MOD_RES (6)..(6): 4-carboxy Phe
  MOD_RES (10)..(10): hLeu
  MOD_RES (11)..(11): Alpha-Me S5-pentenyl-alanine olefin amino acid connected by an all-carbon crosslinker comprising one double bond
  C-term NH2
LTFAAFWAQLASAA

SEQ ID NO: 300 - protein, 14 aa, Artificial Sequence
  Description of Artificial Sequence: Synthetic peptide
  N-term Ac
  MOD_RES (4)..(4): Alpha-Me R8-octenyl-alanine olefin amino acid connected by an all-carbon crosslinker comprising one double bond
  misc_feature (4)..(11): Crosslink between residues
  MOD_RES (6)..(6): 4-carboxy Phe
  MOD_RES (10)..(10): hLeu
  MOD_RES (11)..(11): Alpha-Me S5-pentenyl-alanine olefin amino acid connected by an all-carbon crosslinker comprising one double bond
  C-term NH2
LTFAAFWAQLASAA

SEQ ID NO: 301 - protein, 14 aa, Artificial Sequence
  Description of Artificial Sequence: Synthetic peptide
  N-term Ac
  MOD_RES (4)..(4): Alpha-Me R8-octenyl-alanine olefin amino acid connected by an all-carbon crosslinker comprising one double bond
  misc_feature (4)..(11): Crosslink between residues
  MOD_RES (10)..(10): hLeu
  MOD_RES (11)..(11): Alpha-Me S5-pentenyl-alanine olefin amino acid connected by an all-carbon crosslinker comprising one double bond
  C-term NH2
LTFAAYWSQLASAA

SEQ ID NO: 302 - protein, 14 aa, Artificial Sequence
  Description of Artificial Sequence: Synthetic peptide
  N-term Ac
  MOD_RES (4)..(4): Alpha-Me R8-octenyl-alanine olefin amino acid connected by an all-carbon crosslinker comprising one double bond
  misc_feature (4)..(11): Crosslink between residues
  MOD_RES (10)..(10): hLeu
  MOD_RES (11)..(11): Alpha-Me S5-pentenyl-alanine olefin amino acid connected by an all-carbon crosslinker comprising one double bond
  C-term NH2
LTFAAYWSQLASAA

SEQ ID NO: 303 - protein, 15 aa, Artificial Sequence
  Description of Artificial Sequence: Synthetic peptide
  N-term Ac
  MOD_RES (4)..(4): Alpha-Me R8-octenyl-alanine olefin amino acid connected by an all-carbon crosslinker comprising one double bond
  misc_feature (4)..(11): Crosslink between residues
  MOD_RES (11)..(11): Alpha-Me S5-pentenyl-alanine olefin amino acid connected by an all-carbon crosslinker comprising one double bond
  MOD_RES (14)..(14): Norleucine
  C-term NH2
LTFAEYWAQLAAALA

SEQ ID NO: 304 - protein, 15 aa, Artificial Sequence
  Description of Artificial Sequence: Synthetic peptide
  N-term Ac
  MOD_RES (3)..(3): 3,4-difluoro Phe
  MOD_RES (4)..(4): Alpha-Me R8-octenyl-alanine olefin amino acid connected by an all-carbon crosslinker comprising one double bond
  misc_feature (4)..(11): Crosslink between residues
  MOD_RES (11)..(11): Alpha-Me S5-pentenyl-alanine olefin amino acid connected by an all-carbon crosslinker comprising one double bond
  MOD_RES (14)..(14): Norleucine
  C-term NH2
LTFAAYWAQLAAALA

SEQ ID NO: 305 - protein, 15 aa, Artificial Sequence
  Description of Artificial Sequence: Synthetic peptide
  N-term Ac
  MOD_RES (4)..(4): Alpha-Me R8-octenyl-alanine olefin amino acid connected by an all-carbon crosslinker comprising one double bond
  misc_feature (4)..(11): Crosslink between residues
  MOD_RES (6)..(6): 4-carboxy Phe
  MOD_RES (11)..(11): Alpha-Me S5-pentenyl-alanine olefin amino acid connected by an all-carbon crosslinker comprising one double bond
  MOD_RES (14)..(14): Norleucine
  C-term NH2
LTFAAFWAQLAAALA

SEQ ID NO: 306 - protein, 15 aa, Artificial Sequence
  Description of Artificial Sequence: Synthetic peptide
  N-term Ac
  MOD_RES (4)..(4): Alpha-Me R8-octenyl-alanine olefin amino acid connected by an all-carbon crosslinker comprising one double bond
  misc_feature (4)..(11): Crosslink between residues
  MOD_RES (11)..(11): Alpha-Me S5-pentenyl-alanine olefin amino acid connected by an all-carbon crosslinker comprising one double bond
  MOD_RES (14)..(14): Norleucine
  C-term NH2
LTFAAYWSQLAAALA

SEQ ID NO: 307 - protein, 15 aa, Artificial Sequence
  Description of Artificial Sequence: Synthetic peptide
  N-term Ac
  MOD_RES (3)..(3): 3,4-difluoro Phe
  MOD_RES (4)..(4): Alpha-Me R8-octenyl-alanine olefin amino acid connected by an all-carbon crosslinker comprising one double bond
  misc_feature (4)..(11): Crosslink between residues
  MOD_RES (10)..(10): hLeu
  MOD_RES (11)..(11): Alpha-Me S5-pentenyl-alanine olefin amino acid connected by an all-carbon crosslinker comprising one double bond
  MOD_RES (14)..(14): Norleucine
  C-term NH2
LTFAAYWAQLAAALA

SEQ ID NO: 308 - protein, 15 aa, Artificial Sequence
  Description of Artificial Sequence: Synthetic peptide
  N-term Ac
  MOD_RES (3)..(3): 3,4-difluoro Phe
  MOD_RES (4)..(4): Alpha-Me R8-octenyl-alanine olefin amino acid connected by an all-carbon crosslinker comprising one double bond
  misc_feature (4)..(11): Crosslink between residues
  MOD_RES (10)..(10): hLeu
  MOD_RES (11)..(11): Alpha-Me S5-pentenyl-alanine olefin amino acid connected by an all-carbon crosslinker comprising one double bond
  MOD_RES (14)..(14): Norleucine
  C-term NH2
LTFAAYWAQLAAALA

SEQ ID NO: 309 - protein, 15 aa, Artificial Sequence
  Description of Artificial Sequence: Synthetic peptide
  N-term Ac
  MOD_RES (4)..(4): Alpha-Me R8-octenyl-alanine olefin amino acid connected by an all-carbon crosslinker comprising one double bond
  misc_feature (4)..(11): Crosslink between residues
  MOD_RES (6)..(6): 4-carboxy Phe
  MOD_RES (10)..(10): hLeu
  MOD_RES (11)..(11): Alpha-Me S5-pentenyl-alanine olefin amino acid connected by an all-carbon crosslinker comprising one double bond
  MOD_RES (14)..(14): Norleucine
  C-term NH2
LTFAAFWAQLAAALA

SEQ ID NO: 310 - protein, 15 aa, Artificial Sequence
  Description of Artificial Sequence: Synthetic peptide
  N-term Ac
  MOD_RES (4)..(4): Alpha-Me R8-octenyl-alanine olefin amino acid connected by an all-carbon crosslinker comprising one double bond
  misc_feature (4)..(11): Crosslink between residues
  MOD_RES (6)..(6): 4-carboxy Phe
  MOD_RES (10)..(10): hLeu
  MOD_RES (11)..(11): Alpha-Me S5-pentenyl-alanine olefin amino acid connected by an all-carbon crosslinker comprising one double bond
  MOD_RES (14)..(14): Norleucine
  C-term NH2
LTFAAFWAQLAAALA

SEQ ID NO: 311 - protein, 15 aa, Artificial Sequence
  Description of Artificial Sequence: Synthetic peptide
  N-term Ac
  MOD_RES (4)..(4): Alpha-Me R8-octenyl-alanine olefin amino acid connected by an all-carbon crosslinker comprising one double bond
  misc_feature (4)..(11): Crosslink between residues
  MOD_RES (10)..(10): hLeu
  MOD_RES (11)..(11): Alpha-Me S5-pentenyl-alanine olefin amino acid connected by an all-carbon crosslinker comprising one double bond
  MOD_RES (14)..(14): Norleucine
  C-term NH2
LTFAAYWSQLAAALA

SEQ ID NO: 312 - protein, 15 aa, Artificial Sequence
  Description of Artificial Sequence: Synthetic peptide
  N-term Ac
  MOD_RES (4)..(4): Alpha-Me R8-octenyl-alanine olefin amino acid connected by an all-carbon crosslinker comprising one double bond
  misc_feature (4)..(11): Crosslink between residues
  MOD_RES (10)..(10): hLeu
  MOD_RES (11)..(11): Alpha-Me S5-pentenyl-alanine olefin amino acid connected by an all-carbon crosslinker comprising one double bond
  MOD_RES (14)..(14): Norleucine
  C-term NH2
LTFAAYWSQLAAALA

SEQ ID NO: 313 - protein, 16 aa, Artificial Sequence
  Description of Artificial Sequence: Synthetic peptide
  N-term Ac
  MOD_RES (4)..(4): Alpha-Me R8-octenyl-alanine olefin amino acid connected by an all-carbon crosslinker comprising one double bond
  misc_feature (4)..(11): Crosslink between residues
  MOD_RES (10)..(10): hLeu
  MOD_RES (11)..(11): Alpha-Me S5-pentenyl-alanine olefin amino acid connected by an all-carbon crosslinker comprising one double bond
  MOD_RES (16)..(16): D-amino acid
  C-term NH2
LTFAAYWAQLAAAAAA

SEQ ID NO: 314 - protein, 16 aa, Artificial Sequence
  Description of Artificial Sequence: Synthetic peptide
  N-term Ac
  MOD_RES (4)..(4): Alpha-Me R8-octenyl-alanine olefin amino acid connected by an all-carbon crosslinker comprising one double bond
  misc_feature (4)..(11): Crosslink between residues
  MOD_RES (10)..(10): hLeu
  MOD_RES (11)..(11): Alpha-Me S5-pentenyl-alanine olefin amino acid connected by an all-carbon crosslinker comprising one double bond
  MOD_RES (16)..(16): D-amino acid
  C-term NH2
LTFAAYWAQLAAAAAA

SEQ ID NO: 315 - protein, 17 aa, Artificial Sequence
  Description of Artificial Sequence: Synthetic peptide
  N-term Ac
  MOD_RES (4)..(4): Alpha-Me R8-octenyl-alanine olefin amino acid connected by an all-carbon crosslinker comprising one double bond
  misc_feature (4)..(11): Crosslink between residues
  MOD_RES (11)..(11): Alpha-Me S5-pentenyl-alanine olefin amino acid connected by an all-carbon crosslinker comprising one double bond
  MOD_RES (17)..(17): D-amino acid
  C-term NH2
LTFAAYWAQLAAAAAAA

SEQ ID NO: 316 - protein, 18 aa, Artificial Sequence
  Description of Artificial Sequence: Synthetic peptide
  N-term Ac
  MOD_RES (4)..(4): Alpha-Me R8-octenyl-alanine olefin amino acid connected by an all-carbon crosslinker comprising one double bond
  misc_feature (4)..(11): Crosslink between residues
  MOD_RES (11)..(11): Alpha-Me S5-pentenyl-alanine olefin amino acid connected by an all-carbon crosslinker comprising one double bond
  MOD_RES (18)..(18): D-amino acid
  C-term NH2
LTFAAYWAQLAAAAAAAA

SEQ ID NO: 317 - protein, 18 aa, Artificial Sequence
  Description of Artificial Sequence: Synthetic peptide
  N-term Ac
  MOD_RES (4)..(4): Alpha-Me R8-octenyl-alanine olefin amino acid connected by an all-carbon crosslinker comprising one double bond
  misc_feature (4)..(11): Crosslink between residues
  MOD_RES (11)..(11): Alpha-Me S5-pentenyl-alanine olefin amino acid connected by an all-carbon crosslinker comprising one double bond
  MOD_RES (18)..(18): D-amino acid
  C-term NH2
LTFAAYWAQLAAAAAAAA

SEQ ID NO: 318 - protein, 15 aa, Artificial Sequence
  Description of Artificial Sequence: Synthetic peptide
  N-term Ac
  MOD_RES (4)..(4): Alpha-Me R8-octenyl-alanine olefin amino acid connected by an all-carbon crosslinker comprising one double bond
  misc_feature (4)..(11): Crosslink between residues
  MOD_RES (10)..(10): hLeu
  MOD_RES (11)..(11): Alpha-Me S5-pentenyl-alanine olefin amino acid connected by an all-carbon crosslinker comprising one double bond
  MOD_RES (14)..(14): Norleucine
  C-term NH2
LTFAEYWAQLAAALA

SEQ ID NO: 319 - protein, 16 aa, Artificial Sequence
  Description of Artificial Sequence: Synthetic peptide
  N-term Ac
  MOD_RES (5)..(5): Alpha-Me R8-octenyl-alanine olefin amino acid connected by an all-carbon crosslinker comprising one double bond
  misc_feature (5)..(12): Crosslink between residues
  MOD_RES (12)..(12): Alpha-Me S5-pentenyl-alanine olefin amino acid connected by an all-carbon crosslinker comprising one double bond
  MOD_RES (15)..(15): Norleucine
  C-term NH2
AATFAAYWAQLAAALA

SEQ ID NO: 320 - protein, 16 aa, Artificial Sequence
  Description of Artificial Sequence: Synthetic peptide
  N-term Ac
  MOD_RES (4)..(4): Alpha-Me R8-octenyl-alanine olefin amino acid connected by an all-carbon crosslinker comprising one double bond
  misc_feature (4)..(11): Crosslink between residues
  MOD_RES (11)..(11): Alpha-Me S5-pentenyl-alanine olefin amino acid connected by an all-carbon crosslinker comprising one double bond
  MOD_RES (14)..(14): Norleucine
  C-term NH2
LTFAAYWAQLAAALAA

SEQ ID NO: 321 - protein, 17 aa, Artificial Sequence
  Description of Artificial Sequence: Synthetic peptide
  N-term Ac
  MOD_RES (5)..(5): Alpha-Me R8-octenyl-alanine olefin amino acid connected by an all-carbon crosslinker comprising one double bond
  misc_feature (5)..(12): Crosslink between residues
  MOD_RES (12)..(12): Alpha-Me S5-pentenyl-alanine olefin amino acid connected by an all-carbon crosslinker comprising one double bond
  MOD_RES (15)..(15): Norleucine
  C-term NH2
ALTFAAYWAQLAAALAA

SEQ ID NO: 322 - protein, 16 aa, Artificial Sequence
  Description of Artificial Sequence: Synthetic peptide
  N-term Ac
  MOD_RES (4)..(4): Alpha-Me R8-octenyl-alanine olefin amino acid connected by an all-carbon crosslinker comprising one double bond
  misc_feature (4)..(11): Crosslink between residues
  MOD_RES (10)..(10): Cyclobutyl-Ala
  MOD_RES (11)..(11): Alpha-Me S5-pentenyl-alanine olefin amino acid connected by an all-carbon crosslinker comprising one double bond
  MOD_RES (14)..(14): Norleucine
  C-term NH2
LTFAAYWAQAAAALAA

SEQ ID NO: 323 - protein, 16 aa, Artificial Sequence
  Description of Artificial Sequence: Synthetic peptide
  N-term Ac
  MOD_RES (4)..(4): Alpha-Me R8-octenyl-alanine olefin amino acid connected by an all-carbon crosslinker comprising one double bond
  misc_feature (4)..(11): Crosslink between residues
  MOD_RES (10)..(10): hLeu
  MOD_RES (11)..(11): Alpha-Me S5-pentenyl-alanine olefin amino acid connected by an all-carbon crosslinker comprising one double bond
  MOD_RES (14)..(14): Norleucine
  C-term NH2
LTFAAYWAQLAAALAA

SEQ ID NO: 324 - protein, 15 aa, Artificial Sequence
  Description of Artificial Sequence: Synthetic peptide
  N-term Ac
  MOD_RES (4)..(4): Alpha-Me R8-octenyl-alanine olefin amino acid connected by an all-carbon crosslinker comprising one double bond
  misc_feature (4)..(11): Crosslink between residues
  MOD_RES (10)..(10): Cyclobutyl-Ala
  MOD_RES (11)..(11): Alpha-Me S5-pentenyl-alanine olefin amino acid connected by an all-carbon crosslinker comprising one double bond
  C-term NH2
LTFAEYWAQAASAAA

SEQ ID NO: 325 - protein, 15 aa, Artificial Sequence
  Description of Artificial Sequence: Synthetic peptide
  N-term Ac
  MOD_RES (4)..(4): Alpha-Me R8-octenyl-alanine olefin amino acid connected by an all-carbon crosslinker comprising one double bond
  misc_feature (4)..(11): Crosslink between residues
  MOD_RES (10)..(10): Cyclobutyl-Ala
  MOD_RES (11)..(11): Alpha-Me S5-pentenyl-alanine olefin amino acid connected by an all-carbon crosslinker comprising one double bond
  C-term NH2
LTFAEYWAQAASAAA

SEQ ID NO: 326 - protein, 16 aa, Artificial Sequence
  Description of Artificial Sequence: Synthetic peptide
  N-term Ac
  MOD_RES (4)..(4): Alpha-Me R8-octenyl-alanine olefin amino acid connected by an all-carbon crosslinker comprising one double bond
  misc_feature (4)..(11): Crosslink between residues
  MOD_RES (10)..(10): Cyclobutyl-Ala
  MOD_RES (11)..(11): Alpha-Me S5-pentenyl-alanine olefin amino acid connected by an all-carbon crosslinker comprising one double bond
  C-term NH2
LTFAEYWAQAASAAAA

SEQ ID NO: 327 - protein, 16 aa, Artificial Sequence
  Description of Artificial Sequence: Synthetic peptide
  N-term Ac
  MOD_RES (4)..(4): Alpha-Me R8-octenyl-alanine olefin amino acid connected by an all-carbon crosslinker comprising one double bond
  misc_feature (4)..(11): Crosslink between residues
  MOD_RES (10)..(10): Cyclobutyl-Ala
  MOD_RES (11)..(11): Alpha-Me S5-pentenyl-alanine olefin amino acid connected by an all-carbon crosslinker comprising one double bond
  C-term NH2
LTFAEYWAQAASAAAA

SEQ ID NO: 328 - protein, 15 aa, Artificial Sequence
  Description of Artificial Sequence: Synthetic peptide
  N-term Ac
  MOD_RES (5)..(5): Alpha-Me R8-octenyl-alanine olefin amino acid connected by an all-carbon crosslinker comprising one double bond
  misc_feature (5)..(12): Crosslink between residues
  MOD_RES (11)..(11): Cyclobutyl-Ala
  MOD_RES (12)..(12): Alpha-Me S5-pentenyl-alanine olefin amino acid connected by an all-carbon crosslinker comprising one double bond
  C-term NH2
ALTFAEYWAQAASAA

SEQ ID NO: 329 - protein, 16 aa, Artificial Sequence
  Description of Artificial Sequence: Synthetic peptide
  N-term Ac
  MOD_RES (5)..(5): Alpha-Me R8-octenyl-alanine olefin amino acid connected by an all-carbon crosslinker comprising one double bond
  misc_feature (5)..(12): Crosslink between residues
  MOD_RES (11)..(11): Cyclobutyl-Ala
  MOD_RES (12)..(12): Alpha-Me S5-pentenyl-alanine olefin amino acid connected by an all-carbon crosslinker comprising one double bond
  C-term NH2
ALTFAEYWAQAASAAA

SEQ ID NO: 330 - protein, 15 aa, Artificial Sequence
  Description of Artificial Sequence: Synthetic peptide
  N-term Ac
  MOD_RES (5)..(5): Alpha-Me R8-octenyl-alanine olefin amino acid connected by an all-carbon crosslinker comprising one double bond
  misc_feature (5)..(12): Crosslink between residues
  MOD_RES (11)..(11): Cyclobutyl-Ala
  MOD_RES (12)..(12): Alpha-Me S5-pentenyl-alanine olefin amino acid connected by an all-carbon crosslinker comprising one double bond
  C-term NH2
ALTFAEYWAQAASAA

SEQ ID NO: 331 - protein, 17 aa, Artificial Sequence
  Description of Artificial Sequence: Synthetic peptide
  N-term Ac
  MOD_RES (4)..(4): Alpha-Me R8-octenyl-alanine olefin amino acid connected by an all-carbon crosslinker comprising one double bond
  misc_feature (4)..(11): Crosslink between residues
  MOD_RES (11)..(11): Alpha-Me S5-pentenyl-alanine olefin amino acid connected by an all-carbon crosslinker comprising one double bond
  MOD_RES (17)..(17): D-amino acid
  C-term NH2
LTFAEYWAQLAAAAAAA

SEQ ID NO: 332 - protein, 14 aa, Artificial Sequence
  Description of Artificial Sequence: Synthetic peptide
  N-term Ac
  MOD_RES (4)..(4): Alpha-Me R8-octenyl-alanine olefin amino acid connected by an all-carbon crosslinker comprising one double bond
  misc_feature (4)..(11): Crosslink between residues
  MOD_RES (7)..(7): 6cl-Trp
  MOD_RES (10)..(10): Cyclobutyl-Ala
  MOD_RES (11)..(11): Alpha-Me S5-pentenyl-alanine olefin amino acid connected by an all-carbon crosslinker comprising one double bond
  C-term NH2
LTFAEYWAQAASAA

SEQ ID NO: 333 - protein, 15 aa, Artificial Sequence
  Description of Artificial Sequence: Synthetic peptide
  N-term Ac
  MOD_RES (4)..(4): Alpha-Me R8-octenyl-alanine olefin amino acid connected by an all-carbon crosslinker comprising one double bond
  misc_feature (4)..(11): Crosslink between residues
  MOD_RES (6)..(6): 4-carboxy Phe
  MOD_RES (7)..(7): 6cl-Trp
  MOD_RES (10)..(10): Cyclobutyl-Ala
  MOD_RES (11)..(11): Alpha-Me S5-pentenyl-alanine olefin amino acid connected by an all-carbon crosslinker comprising one double bond
  MOD_RES (14)..(14): Norleucine
  C-term NH2
LTFAEFWAQAASALA

SEQ ID NO: 334 - protein, 15 aa, Artificial Sequence
  Description of Artificial Sequence: Synthetic peptide
  N-term Ac
  MOD_RES (4)..(4): Alpha-Me R8-octenyl-alanine olefin amino acid connected by an all-carbon crosslinker comprising one double bond
  misc_feature (4)..(11): Crosslink between residues
  MOD_RES (6)..(6): 4-carboxy Phe
  MOD_RES (7)..(7): 6cl-Trp
  MOD_RES (10)..(10): Cyclobutyl-Ala
  MOD_RES (11)..(11): Alpha-Me S5-pentenyl-alanine olefin amino acid connected by an all-carbon crosslinker comprising one double bond
  MOD_RES (14)..(14): Norleucine
  C-term NH2
LTFAEFWAQAASALA

SEQ ID NO: 335 - protein, 15 aa, Artificial Sequence
  Description of Artificial Sequence: Synthetic peptide
  N-term Ac
  MOD_RES (4)..(4): Alpha-Me R8-octenyl-alanine olefin amino acid connected by an all-carbon crosslinker comprising one double bond
  misc_feature (4)..(11): Crosslink between residues
  MOD_RES (6)..(6): 4-carboxy Phe
  MOD_RES (7)..(7): 6cl-Trp
  MOD_RES (10)..(10): Cyclobutyl-Ala
  MOD_RES (11)..(11): Alpha-Me S5-pentenyl-alanine olefin amino acid connected by an all-carbon crosslinker comprising one double bond
  MOD_RES (15)..(15): D-amino acid
  C-term NH2
LTFAEFWAQAAAAIA

SEQ ID NO: 336 - protein, 15 aa, Artificial Sequence
  Description of Artificial Sequence: Synthetic peptide
  N-term Ac
  MOD_RES (4)..(4): Alpha-Me R8-octenyl-alanine olefin amino acid connected by an all-carbon crosslinker comprising one double bond
  misc_feature (4)..(11): Crosslink between residues
  MOD_RES (6)..(6): 4-carboxy Phe
  MOD_RES (7)..(7): 6cl-Trp
  MOD_RES (10)..(10): Cyclobutyl-Ala
  MOD_RES (11)..(11): Alpha-Me S5-pentenyl-alanine olefin amino acid connected by an all-carbon crosslinker comprising one double bond
  MOD_RES (15)..(15): D-amino acid
  C-term NH2
LTFAEFWAQAAAAIA

SEQ ID NO: 337 - protein, 17 aa, Artificial Sequence
  Description of Artificial Sequence: Synthetic peptide
  N-term Ac
  MOD_RES (4)..(4): Alpha-Me R8-octenyl-alanine olefin amino acid connected by an all-carbon crosslinker comprising one double bond
  misc_feature (4)..(11): Crosslink between residues
  MOD_RES (7)..(7): 6cl-Trp
  MOD_RES (11)..(11): Alpha-Me S5-pentenyl-alanine olefin amino acid connected by an all-carbon crosslinker comprising one double bond
  MOD_RES (17)..(17): D-amino acid
  C-term NH2
LTFAAYWAQLAAAAAAA

SEQ ID NO: 338 - protein, 17 aa, Artificial Sequence
  Description of Artificial Sequence: Synthetic peptide
  N-term Ac
  MOD_RES (4)..(4): Alpha-Me R8-octenyl-alanine olefin amino acid connected by an all-carbon crosslinker comprising one double bond
  misc_feature (4)..(11): Crosslink between residues
  MOD_RES (7)..(7): 6cl-Trp
  MOD_RES (11)..(11): Alpha-Me S5-pentenyl-alanine olefin amino acid connected by an all-carbon crosslinker comprising one double bond
  MOD_RES (17)..(17): D-amino acid
  C-term NH2
LTFAAYWAQLAAAAAAA

SEQ ID NO: 339 - protein, 16 aa, Artificial Sequence
  Description of Artificial Sequence: Synthetic peptide
  N-term Ac
  MOD_RES (2)..(2): Alpha-Me R8-octenyl-alanine olefin amino acid connected by an all-carbon crosslinker comprising one double bond
  misc_feature (2)..(4): Crosslink between residues
  MOD_RES (5)..(5): 6cl-Trp
  MOD_RES (16)..(16): D-amino acid
  C-term NH2
FAAYWEALAAAAAAAA

SEQ ID NO: 340 - protein, 17 aa, Artificial Sequence
  Description of Artificial Sequence: Synthetic peptide
  N-term Ac
  MOD_RES (4)..(4): Alpha-Me R8-octenyl-alanine olefin amino acid connected by an all-carbon crosslinker comprising one double bond
  misc_feature (4)..(11): Crosslink between residues
  MOD_RES (11)..(11): Alpha-Me S5-pentenyl-alanine olefin amino acid connected by an all-carbon crosslinker comprising one double bond
  MOD_RES (17)..(17): D-amino acid
  C-term NH2
ETFAEYWAQLAAAAAAA

SEQ ID NO: 341 - protein, 17 aa, Artificial Sequence
  Description of Artificial Sequence: Synthetic peptide
  N-term Ac
  MOD_RES (4)..(4): Alpha-Me R8-octenyl-alanine olefin amino acid connected by an all-carbon crosslinker comprising one double bond
  misc_feature (4)..(11): Crosslink between residues
  MOD_RES (11)..(11): Alpha-Me S5-pentenyl-alanine olefin amino acid connected by an all-carbon crosslinker comprising one double bond
  MOD_RES (17)..(17): D-amino acid
  C-term NH2
ETFAEYWAQLAAAAAAA

SEQ ID NO: 342 - protein, 18 aa, Artificial Sequence
  Description of Artificial Sequence: Synthetic peptide
  N-term Ac
  MOD_RES (4)..(4): Alpha-Me R8-octenyl-alanine olefin amino acid connected by an all-carbon crosslinker comprising one double bond
  misc_feature (4)..(11): Crosslink between residues
  MOD_RES (11)..(11): Alpha-Me S5-pentenyl-alanine olefin amino acid connected by an all-carbon crosslinker comprising one double bond
  MOD_RES (18)..(18): D-amino acid
  C-term NH2
LTFAEYWAQLAAAAAAAA

SEQ ID NO: 343 - protein, 18 aa, Artificial Sequence
  Description of Artificial Sequence: Synthetic peptide
  N-term Ac
  MOD_RES (4)..(4): Alpha-Me R8-octenyl-alanine olefin amino acid connected by an all-carbon crosslinker comprising one double bond
  misc_feature (4)..(11): Crosslink between residues
  MOD_RES (11)..(11): Alpha-Me S5-pentenyl-alanine olefin amino acid connected by an all-carbon crosslinker comprising one double bond
  MOD_RES (18)..(18): D-amino acid
  C-term NH2
LTFAEYWAQLAAAAAAAA

SEQ ID NO: 344 - protein, 17 aa, Artificial Sequence
  Description of Artificial Sequence: Synthetic peptide
  N-term Ac
  MOD_RES (4)..(4): Alpha-Me R8-octenyl-alanine olefin amino acid connected by an all-carbon crosslinker comprising one double bond
  misc_feature (4)..(11): Crosslink between residues
  MOD_RES (11)..(11): Alpha-Me S5-pentenyl-alanine olefin amino acid connected by an all-carbon crosslinker comprising one double bond
  MOD_RES (14)..(14): Norleucine
  MOD_RES (17)..(17): D-amino acid
  C-term NH2
LTFAAYWAQLAAALAAA

SEQ ID NO: 345 - protein, 17 aa, Artificial Sequence
  Description of Artificial Sequence: Synthetic peptide
  N-term Ac
  MOD_RES (4)..(4): Alpha-Me R8-octenyl-alanine olefin amino acid connected by an all-carbon crosslinker comprising one double bond
  misc_feature (4)..(11): Crosslink between residues
  MOD_RES (11)..(11): Alpha-Me S5-pentenyl-alanine olefin amino acid connected by an all-carbon crosslinker comprising one double bond
  MOD_RES (14)..(14): Norleucine
  MOD_RES (17)..(17): D-amino acid
  C-term NH2
LTFAAYWAQLAAALAAA

SEQ ID NO: 346 - protein, 17 aa, Artificial Sequence
  Description of Artificial Sequence: Synthetic peptide
  N-term Ac
  MOD_RES (4)..(4): Alpha-Me R8-octenyl-alanine olefin amino acid connected by an all-carbon crosslinker comprising one double bond
  misc_feature (4)..(11): Crosslink between residues
  MOD_RES (10)..(10): Cyclobutyl-Ala
  MOD_RES (11)..(11): Alpha-Me S5-pentenyl-alanine olefin amino acid connected by an all-carbon crosslinker comprising one double bond
  MOD_RES (17)..(17): D-amino acid
  C-term NH2
LTFAEYWAQAAAAAAAA

SEQ ID NO: 347 - protein, 17 aa, Artificial Sequence
  Description of Artificial Sequence: Synthetic peptide
  N-term Ac
  MOD_RES (4)..(4): Alpha-Me R8-octenyl-alanine olefin amino acid connected by an all-carbon crosslinker comprising one double bond
  misc_feature (4)..(11): Crosslink between residues
  MOD_RES (10)..(10): Cyclobutyl-Ala
  MOD_RES (11)..(11): Alpha-Me S5-pentenyl-alanine olefin amino acid connected by an all-carbon crosslinker comprising one double bond
  MOD_RES (17)..(17): D-amino acid
  C-term NH2
LTFAEYWAQAAAAAAAA

SEQ ID NO: 348 - protein, 17 aa, Artificial Sequence
  Description of Artificial Sequence: Synthetic peptide
  N-term Ac
  MOD_RES (4)..(4): Alpha-Me R8-octenyl-alanine olefin amino acid connected by an all-carbon crosslinker comprising one double bond
  misc_feature (4)..(11): Crosslink between residues
  MOD_RES (6)..(6): 4-carboxy Phe
  MOD_RES (10)..(10): Cyclobutyl-Ala
  MOD_RES (11)..(11): Alpha-Me S5-pentenyl-alanine olefin amino acid connected by an all-carbon crosslinker comprising one double bond
  MOD_RES (17)..(17): D-amino acid
  C-term NH2
LTFAEFWAQAAAAAAAA

SEQ ID NO: 349 - protein, 17 aa, Artificial Sequence
  Description of Artificial Sequence: Synthetic peptide
  N-term Ac
  MOD_RES (4)..(4): Alpha-Me R8-octenyl-alanine olefin amino acid connected by an all-carbon crosslinker comprising one double bond
  misc_feature (4)..(11): Crosslink between residues
  MOD_RES (6)..(6): 4-carboxy Phe
  MOD_RES (10)..(10): Cyclobutyl-Ala
  MOD_RES (11)..(11): Alpha-Me S5-pentenyl-alanine olefin amino acid connected by an all-carbon crosslinker comprising one double bond
  MOD_RES (17)..(17): D-amino acid
  C-term NH2
LTFAEFWAQAAAAAAAA

SEQ ID NO: 350 - protein, 17 aa, Artificial Sequence
  Description of Artificial Sequence: Synthetic peptide
  N-term Ac
  MOD_RES (4)..(4): Alpha-Me R8-octenyl-alanine olefin amino acid connected by an all-carbon crosslinker comprising one double bond
  misc_feature (4)..(11): Crosslink between residues
  MOD_RES (10)..(10): Cyclobutyl-Ala
  MOD_RES (11)..(11): Alpha-Me S5-pentenyl-alanine olefin amino acid connected by an all-carbon crosslinker comprising one double bond
  MOD_RES (17)..(17): D-amino acid
  C-term NH2
LTFAEYWSQAAAAAAAA

SEQ ID NO: 351 - protein, 17 aa, Artificial Sequence
  Description of Artificial Sequence: Synthetic peptide
  N-term Ac
  MOD_RES (4)..(4): Alpha-Me R8-octenyl-alanine olefin amino acid connected by an all-carbon crosslinker comprising one double bond
  misc_feature (4)..(11): Crosslink between residues
  MOD_RES (10)..(10): Cyclobutyl-Ala
  MOD_RES (11)..(11): Alpha-Me S5-pentenyl-alanine olefin amino acid connected by an all-carbon crosslinker comprising one double bond
  MOD_RES (17)..(17): D-amino acid
  C-term NH2
LTFAEYWSQAAAAAAAA

SEQ ID NO: 352 - protein, 15 aa, Artificial Sequence
  Description of Artificial Sequence: Synthetic peptide
  N-term Ac
  MOD_RES (4)..(4): Alpha-Me R8-octenyl-alanine olefin amino acid connected by an all-carbon crosslinker comprising one double bond
  misc_feature (4)..(11): Crosslink between residues
  MOD_RES (10)..(10): Cyclobutyl-Ala
  MOD_RES (11)..(11): Alpha-Me S5-pentenyl-alanine olefin amino acid connected by an all-carbon crosslinker comprising one double bond
  MOD_RES (15)..(15): D-amino acid
  C-term NH2
LTFAEYWAQAASAAA

SEQ ID NO: 353 - protein, 15 aa, Artificial Sequence
  Description of Artificial Sequence: Synthetic peptide
  N-term Ac
  MOD_RES (4)..(4): Alpha-Me R8-octenyl-alanine olefin amino acid connected by an all-carbon crosslinker comprising one double bond
  misc_feature (4)..(11): Crosslink between residues
  MOD_RES (10)..(10): Cyclobutyl-Ala
  MOD_RES (11)..(11): Alpha-Me S5-pentenyl-alanine olefin amino acid connected by an all-carbon crosslinker comprising one double bond
  MOD_RES (15)..(15): D-amino acid
  C-term NH2
LTFAEYWAQAASAAA

SEQ ID NO: 354 - protein, 16 aa, Artificial Sequence
  Description of Artificial Sequence: Synthetic peptide
  N-term Ac
  MOD_RES (5)..(5): Alpha-Me R8-octenyl-alanine olefin amino acid connected by an all-carbon crosslinker comprising one double bond
  misc_feature (5)..(12): Crosslink between residues
  MOD_RES (11)..(11): Cyclobutyl-Ala
  MOD_RES (12)..(12): Alpha-Me S5-pentenyl-alanine olefin amino acid connected by an all-carbon crosslinker comprising one double bond
  MOD_RES (16)..(16): D-amino acid
  C-term NH2
ALTFAEYWAQAASAAA

SEQ ID NO: 355 - protein, 16 aa, Artificial Sequence
  Description of Artificial Sequence: Synthetic peptide
  N-term Ac
  MOD_RES (5)..(5): Alpha-Me R8-octenyl-alanine olefin amino acid connected by an all-carbon crosslinker comprising one double bond
  misc_feature (5)..(12): Crosslink between residues
  MOD_RES (11)..(11): Cyclobutyl-Ala
  MOD_RES (12)..(12): Alpha-Me S5-pentenyl-alanine olefin amino acid connected by an all-carbon crosslinker comprising one double bond
  MOD_RES (16)..(16): D-amino acid
  C-term NH2
ALTFAEYWAQAASAAA

SEQ ID NO: 356 - protein, 17 aa, Artificial Sequence
  Description of Artificial Sequence: Synthetic peptide
  N-term Ac
  MOD_RES (5)..(5): Alpha-Me R8-octenyl-alanine olefin amino acid connected by an all-carbon crosslinker comprising one double bond
  misc_feature (5)..(12): Crosslink between residues
  MOD_RES (11)..(11): Cyclobutyl-Ala
  MOD_RES (12)..(12): Alpha-Me S5-pentenyl-alanine olefin amino acid connected by an all-carbon crosslinker comprising one double bond
  MOD_RES (17)..(17): D-amino acid
  C-term NH2
ALTFAEYWAQAASAAAA

SEQ ID NO: 357 - protein, 17 aa, Artificial Sequence
  Description of Artificial Sequence: Synthetic peptide
  N-term Ac
  MOD_RES (5)..(5): Alpha-Me R8-octenyl-alanine olefin amino acid connected by an all-carbon crosslinker comprising one double bond
  misc_feature (5)..(12): Crosslink between residues
  MOD_RES (11)..(11): Cyclobutyl-Ala
  MOD_RES (12)..(12): Alpha-Me S5-pentenyl-alanine olefin amino acid connected by an all-carbon crosslinker comprising one double bond
  MOD_RES (17)..(17): D-amino acid
  C-term NH2
ALTFAEYWAQAASAAAA

SEQ ID NO: 358 - protein, 18 aa, Artificial Sequence
  Description of Artificial Sequence: Synthetic peptide
  N-term Ac
  MOD_RES (6)..(6): Alpha-Me R8-octenyl-alanine olefin amino acid connected by an all-carbon crosslinker comprising one double bond
  misc_feature (6)..(13): Crosslink between residues
  MOD_RES (12)..(12): Cyclobutyl-Ala
  MOD_RES (13)..(13): Alpha-Me S5-pentenyl-alanine olefin amino acid connected by an all-carbon crosslinker comprising one double bond
  MOD_RES (18)..(18): D-amino acid
  C-term NH2
AALTFAEYWAQAASAAAA

SEQ ID NO: 359 - protein, 18 aa, Artificial Sequence
  Description of Artificial Sequence: Synthetic peptide
  N-term Ac
  MOD_RES (6)..(6): Alpha-Me R8-octenyl-alanine olefin amino acid connected by an all-carbon crosslinker comprising one double bond
  misc_feature (6)..(13): Crosslink between residues
  MOD_RES (12)..(12): Cyclobutyl-Ala
  MOD_RES (13)..(13): Alpha-Me S5-pentenyl-alanine olefin amino acid connected by an all-carbon crosslinker comprising one double bond
  MOD_RES (18)..(18): D-amino acid
  C-term NH2
AALTFAEYWAQAASAAAA

SEQ ID NO: 360 - protein, 14 aa, Artificial Sequence
  Description of Artificial Sequence: Synthetic peptide
  N-term Ac
  MOD_RES (4)..(4): Alpha-Me R8-octenyl-alanine olefin amino acid connected by an all-carbon crosslinker comprising one double bond
  misc_feature (4)..(11): Crosslink between residues
  MOD_RES (10)..(10): Cyclobutyl-Ala
  MOD_RES (11)..(11): Alpha-Me S5-pentenyl-alanine olefin amino acid connected by an all-carbon crosslinker comprising one double bond
  C-term NH2
RTFAEYWAQAASAA

SEQ ID NO: 361 - protein, 14 aa, Artificial Sequence
  Description of Artificial Sequence: Synthetic peptide
  N-term Ac
  MOD_RES (4)..(4): Alpha-Me R8-octenyl-alanine olefin amino acid connected by an all-carbon crosslinker comprising one double bond
  misc_feature (4)..(11): Crosslink between residues
  MOD_RES (10)..(10): Cyclobutyl-Ala
  MOD_RES (11)..(11): Alpha-Me S5-pentenyl-alanine olefin amino acid connected by an all-carbon crosslinker comprising one double bond
  C-term NH2
LRFAEYWAQAASAA

SEQ ID NO: 362 - protein, 14 aa, Artificial Sequence
  Description of Artificial Sequence: Synthetic peptide
  N-term Ac
  MOD_RES (4)..(4): Alpha-Me R8-octenyl-alanine olefin amino acid connected by an all-carbon crosslinker comprising one double bond
  misc_feature (4)..(11): Crosslink between residues
  MOD_RES (10)..(10): Cyclobutyl-Ala
  MOD_RES (11)..(11): Alpha-Me S5-pentenyl-alanine olefin amino acid connected by an all-carbon crosslinker comprising one double bond
  C-term NH2
LTFAEYWRQAASAA

SEQ ID NO: 363 - protein, 14 aa, Artificial Sequence
  Description of Artificial Sequence: Synthetic peptide
  N-term Ac
  MOD_RES (4)..(4): Alpha-Me R8-octenyl-alanine olefin amino acid connected by an all-carbon crosslinker comprising one double bond
  misc_feature (4)..(11): Crosslink between residues
  MOD_RES (10)..(10): Cyclobutyl-Ala
  MOD_RES (11)..(11): Alpha-Me S5-pentenyl-alanine olefin amino acid connected by an all-carbon crosslinker comprising one double bond
  C-term NH2
LTFAEYWARAASAA

SEQ ID NO: 364 - protein, 14 aa, Artificial Sequence
  Description of Artificial Sequence: Synthetic peptide
  N-term Ac
  MOD_RES (4)..(4): Alpha-Me R8-octenyl-alanine olefin amino acid connected by an all-carbon crosslinker comprising one double bond
  misc_feature (4)..(11): Crosslink between residues
  MOD_RES (10)..(10): Cyclobutyl-Ala
  MOD_RES (11)..(11): Alpha-Me S5-pentenyl-alanine olefin amino acid connected by an all-carbon crosslinker comprising one double bond
  C-term NH2
LTFAEYWAQAARAA

SEQ ID NO: 365 - protein, 14 aa, Artificial Sequence
  Description of Artificial Sequence: Synthetic peptide
  N-term Ac
  MOD_RES (4)..(4): Alpha-Me R8-octenyl-alanine olefin amino acid connected by an all-carbon crosslinker comprising one double bond
  misc_feature (4)..(11): Crosslink between residues
  MOD_RES (10)..(10): Cyclobutyl-Ala
  MOD_RES (11)..(11): Alpha-Me S5-pentenyl-alanine olefin amino acid connected by an all-carbon crosslinker comprising one double bond
  C-term NH2
LTFAEYWAQAASRA

SEQ ID NO: 366 - protein, 14 aa, Artificial Sequence
  Description of Artificial Sequence: Synthetic peptide
  N-term Ac
  MOD_RES (4)..(4): Alpha-Me R8-octenyl-alanine olefin amino acid connected by an all-carbon crosslinker comprising one double bond
  misc_feature (4)..(11): Crosslink between residues
  MOD_RES (10)..(10): Cyclobutyl-Ala
  MOD_RES (11)..(11): Alpha-Me S5-pentenyl-alanine olefin amino acid connected by an all-carbon crosslinker comprising one double bond
  C-term NH2
LTFAEYWAQAASAR

SEQ ID NO: 367 - protein, 15 aa, Artificial Sequence
  Description of Artificial Sequence: Synthetic peptide
  N-term 5-FAM
  MOD_RES (1)..(1): Beta-Ala
  MOD_RES (5)..(5): Alpha-Me R8-octenyl-alanine olefin amino acid connected by an all-carbon crosslinker comprising one double bond
  misc_feature (5)..(12): Crosslink between residues
  MOD_RES (11)..(11): Cyclobutyl-Ala
  MOD_RES (12)..(12): Alpha-Me S5-pentenyl-alanine olefin amino acid connected by an all-carbon crosslinker comprising one double bond
  C-term NH2
ALTFAEYWAQAASAA

SEQ ID NO: 368 - protein, 16 aa, Artificial Sequence
  Description of Artificial Sequence: Synthetic peptide
  N-term 5-FAM
  MOD_RES (1)..(1): Beta-Ala
  MOD_RES (5)..(5): Alpha-Me R8-octenyl-alanine olefin amino acid connected by an all-carbon crosslinker comprising one double bond
  misc_feature (5)..(12): Crosslink between residues
  MOD_RES (12)..(12): Alpha-Me S5-pentenyl-alanine olefin amino acid connected by an all-carbon crosslinker comprising one double bond
  MOD_RES (15)..(15): Norleucine
  C-term NH2
ALTFAAYWAQLAAALA

SEQ ID NO: 369 - protein, 15 aa, Artificial Sequence
  Description of Artificial Sequence: Synthetic peptide
  N-term Ac
  MOD_RES (4)..(4): Alpha-Me R8-octenyl-alanine olefin amino acid connected by an all-carbon crosslinker comprising one double bond
  misc_feature (4)..(11): Crosslink between residues
  MOD_RES (11)..(11): Alpha-Me S5-pentenyl-alanine olefin amino acid connected by an all-carbon crosslinker comprising one double bond
  MOD_RES (14)..(14): Norleucine
  C-term NH2
LAFAEYWAQLAAALA

SEQ ID NO: 370 - protein, 15 aa, Artificial Sequence
  Description of Artificial Sequence: Synthetic peptide
  N-term Ac
  MOD_RES (4)..(4): Alpha-Me R8-octenyl-alanine olefin amino acid connected by an all-carbon crosslinker comprising one double bond
  misc_feature (4)..(11): Crosslink between residues
  MOD_RES (11)..(11): Alpha-Me S5-pentenyl-alanine olefin amino acid connected by an all-carbon crosslinker comprising one double bond
  MOD_RES (14)..(14): Norleucine
  C-term NH2
ATFAEYWAQLAAALA

SEQ ID NO: 371 - protein, 15 aa, Artificial Sequence
  Description of Artificial Sequence: Synthetic peptide
  N-term Ac
  MOD_RES (4)..(4): Alpha-Me R8-octenyl-alanine olefin amino acid connected by an all-carbon crosslinker comprising one double bond
  misc_feature (4)..(11): Crosslink between residues
  MOD_RES (11)..(11): Alpha-Me S5-pentenyl-alanine olefin amino acid connected by an all-carbon crosslinker comprising one double bond
  MOD_RES (14)..(14): Norleucine
  C-term NH2
AAFAEYWAQLAAALA

SEQ ID NO: 372 - protein, 16 aa, Artificial Sequence
  Description of Artificial Sequence: Synthetic peptide
  N-term Ac
  MOD_RES (5)..(5): Alpha-Me R8-octenyl-alanine olefin amino acid connected by an all-carbon crosslinker comprising one double bond
  misc_feature (5)..(12): Crosslink between residues
  MOD_RES (12)..(12): Alpha-Me S5-pentenyl-alanine olefin amino acid connected by an all-carbon crosslinker comprising one double bond
  MOD_RES (15)..(15): Norleucine
  C-term NH2
AAAFAEYWAQLAAALA

SEQ ID NO: 373 - protein, 17 aa, Artificial Sequence
  Description of Artificial Sequence: Synthetic peptide
  N-term Ac
  MOD_RES (6)..(6): Alpha-Me R8-octenyl-alanine olefin amino acid connected by an all-carbon crosslinker comprising one double bond
  misc_feature (6)..(13): Crosslink between residues
  MOD_RES (13)..(13): Alpha-Me S5-pentenyl-alanine olefin amino acid connected by an all-carbon crosslinker comprising one double bond
  MOD_RES (16)..(16): Norleucine
  C-term NH2
AAAAFAEYWAQLAAALA

SEQ ID NO: 374 - protein, 16 aa, Artificial Sequence
  Description of Artificial Sequence: Synthetic peptide
  N-term Ac
  MOD_RES (5)..(5): Alpha-Me R8-octenyl-alanine olefin amino acid connected by an all-carbon crosslinker comprising one double bond
  misc_feature (5)..(12): Crosslink between residues
  MOD_RES (12)..(12): Alpha-Me S5-pentenyl-alanine olefin amino acid connected by an all-carbon crosslinker comprising one double bond
  MOD_RES (15)..(15): Norleucine
  C-term NH2
AATFAEYWAQLAAALA

SEQ ID NO: 375 - protein, 17 aa, Artificial Sequence
  Description of Artificial Sequence: Synthetic peptide
  N-term Ac
  MOD_RES (6)..(6): Alpha-Me R8-octenyl-alanine olefin amino acid connected by an all-carbon crosslinker comprising one double bond
  misc_feature (6)..(13): Crosslink between residues
  MOD_RES (13)..(13): Alpha-Me S5-pentenyl-alanine olefin amino acid connected by an all-carbon crosslinker comprising one double bond
  MOD_RES (16)..(16): Norleucine
  C-term NH2
AALTFAEYWAQLAAALA

SEQ ID NO: 376 - protein, 18 aa, Artificial Sequence
  Description of Artificial Sequence: Synthetic peptide
  N-term Ac
  MOD_RES (7)..(7): Alpha-Me R8-octenyl-alanine olefin amino acid connected by an all-carbon crosslinker comprising one double bond
  misc_feature (7)..(14): Crosslink between residues
  MOD_RES (14)..(14): Alpha-Me S5-pentenyl-alanine olefin amino acid connected by an all-carbon crosslinker comprising one double bond
  MOD_RES (17)..(17): Norleucine
  C-term NH2
AAALTFAEYWAQLAAALA

SEQ ID NO: 377 - protein, 16 aa, Artificial Sequence
  Description of Artificial Sequence: Synthetic peptide
  N-term Ac
  MOD_RES (4)..(4): Alpha-Me R8-octenyl-alanine olefin amino acid connected by an all-carbon crosslinker comprising one double bond
  misc_feature (4)..(11): Crosslink between residues
  MOD_RES (11)..(11): Alpha-Me S5-pentenyl-alanine olefin amino acid connected by an all-carbon crosslinker comprising one double bond
  MOD_RES (14)..(14): Norleucine
  C-term NH2
LTFAEYWAQLAAALAA

SEQ ID NO: 378 - protein, 17 aa, Artificial Sequence
  Description of Artificial Sequence: Synthetic peptide
  N-term Ac
  MOD_RES (5)..(5): Alpha-Me R8-octenyl-alanine olefin amino acid connected by an all-carbon crosslinker comprising one double bond
  misc_feature (5)..(12): Crosslink between residues
  MOD_RES (12)..(12): Alpha-Me S5-pentenyl-alanine olefin amino acid connected by an all-carbon crosslinker comprising one double bond
  MOD_RES (15)..(15): Norleucine
  C-term NH2
ALTFAEYWAQLAAALAA

SEQ ID NO: 379 - protein, 18 aa, Artificial Sequence
  Description of Artificial Sequence: Synthetic peptide
  N-term Ac
  MOD_RES (6)..(6): Alpha-Me R8-octenyl-alanine olefin amino acid connected by an all-carbon crosslinker comprising one double bond
  misc_feature (6)..(13): Crosslink between residues
  MOD_RES (13)..(13): Alpha-Me S5-pentenyl-alanine olefin amino acid connected by an all-carbon crosslinker comprising one double bond
  MOD_RES (16)..(16): Norleucine
  C-term NH2
AALTFAEYWAQLAAALAA

SEQ ID NO: 380 - protein, 16 aa, Artificial Sequence
  Description of Artificial Sequence: Synthetic peptide
  N-term Ac
  MOD_RES (4)..(4): Alpha-Me R8-octenyl-alanine olefin amino acid connected by an all-carbon crosslinker comprising one double bond
  misc_feature (4)..(11): Crosslink between residues
  MOD_RES (10)..(10): Cyclobutyl-Ala
  MOD_RES (11)..(11): Alpha-Me S5-pentenyl-alanine olefin amino acid connected by an all-carbon crosslinker comprising one double bond
  MOD_RES (14)..(14): Norleucine
  C-term NH2
LTFAEYWAQAAAALAA

SEQ ID NO: 381 - protein, 16 aa, Artificial Sequence
  Description of Artificial Sequence: Synthetic peptide
  N-term Ac
  MOD_RES (4)..(4): Alpha-Me R8-octenyl-alanine olefin amino acid connected by an all-carbon crosslinker comprising one double bond
  misc_feature (4)..(11): Crosslink between residues
  MOD_RES (10)..(10): hLeu
  MOD_RES (11)..(11): Alpha-Me S5-pentenyl-alanine olefin amino acid connected by an all-carbon crosslinker comprising one double bond
  MOD_RES (14)..(14): Norleucine
  C-term NH2
LTFAEYWAQLAAALAA

SEQ ID NO: 382 - protein, 17 aa, Artificial Sequence
  Description of Artificial Sequence: Synthetic peptide
  N-term Ac
  MOD_RES (5)..(5): Alpha-Me R8-octenyl-alanine olefin amino acid connected by an all-carbon crosslinker comprising one double bond
  misc_feature (5)..(12): Crosslink between residues
  MOD_RES (11)..(11): hLeu
  MOD_RES (12)..(12): Alpha-Me S5-pentenyl-alanine olefin amino acid connected by an all-carbon crosslinker comprising one double bond
  MOD_RES (15)..(15): Norleucine
  C-term NH2
ALTFAEYWAQLAAALAA

SEQ ID NO: 383 - protein, 15 aa, Artificial Sequence
  Description of Artificial Sequence: Synthetic peptide
  N-term Ac
  MOD_RES (4)..(4): Alpha-Me R8-octenyl-alanine olefin amino acid connected by an all-carbon crosslinker comprising one double bond
  misc_feature (4)..(11): Crosslink between residues
  MOD_RES (6)..(6): N-methyl-Tyr
  MOD_RES (11)..(11): Alpha-Me S5-pentenyl-alanine olefin amino acid connected by an all-carbon crosslinker comprising one double bond
  MOD_RES (14)..(14): Norleucine
  C-term NH2
LTFAAYWAQLAAALA

SEQ ID NO: 384 - protein, 15 aa, Artificial Sequence
  Description of Artificial Sequence: Synthetic peptide
  N-term Ac
  MOD_RES (4)..(4): Alpha-Me R8-octenyl-alanine olefin amino acid connected by an all-carbon crosslinker comprising one double bond
  misc_feature (4)..(11): Crosslink between residues
  MOD_RES (6)..(6): N-methyl-Tyr
  MOD_RES (11)..(11): Alpha-Me S5-pentenyl-alanine olefin amino acid connected by an all-carbon crosslinker comprising one double bond
  MOD_RES (14)..(14): Norleucine
  C-term NH2
LTFAAYWAQLAAALA

SEQ ID NO: 385 - protein, 15 aa, Artificial Sequence
  Description of Artificial Sequence: Synthetic peptide
  N-term Ac
  MOD_RES (4)..(4): Alpha-Me R8-octenyl-alanine olefin amino acid connected by an all-carbon crosslinker comprising one double bond
  misc_feature (4)..(11): Crosslink between residues
  MOD_RES (7)..(7): N-methyl-Trp
  MOD_RES (11)..(11): Alpha-Me S5-pentenyl-alanine olefin amino acid connected by an all-carbon crosslinker comprising one double bond
  MOD_RES (14)..(14): Norleucine
  C-term NH2
LTFAAYWAQLAAALA

SEQ ID NO: 386 - protein, 15 aa, Artificial Sequence
  Description of Artificial Sequence: Synthetic peptide
  N-term Ac
  MOD_RES (4)..(4): Alpha-Me R8-octenyl-alanine olefin amino acid connected by an all-carbon crosslinker comprising one double bond
  misc_feature (4)..(11): Crosslink between residues
  MOD_RES (7)..(7): N-methyl-Trp
  MOD_RES (11)..(11): Alpha-Me S5-pentenyl-alanine olefin amino acid connected by an all-carbon crosslinker comprising one double bond
  MOD_RES (14)..(14): Norleucine
  C-term NH2
LTFAAYWAQLAAALA

SEQ ID NO: 387 - protein, 15 aa, Artificial Sequence
  Description of Artificial Sequence: Synthetic peptide
  N-term Ac
  MOD_RES (4)..(4): Alpha-Me R8-octenyl-alanine olefin amino acid connected by an all-carbon crosslinker comprising one double bond
  misc_feature (4)..(11): Crosslink between residues
  MOD_RES (7)..(7): Alpha-Me-Trp
  MOD_RES (11)..(11): Alpha-Me S5-pentenyl-alanine olefin amino acid connected by an all-carbon crosslinker comprising one double bond
  MOD_RES (14)..(14): Norleucine
  C-term NH2
LTFAAYWAQLAAALA

SEQ ID NO: 388 - protein, 15 aa, Artificial Sequence
  Description of Artificial Sequence: Synthetic peptide
  N-term Ac
  MOD_RES (4)..(4): Alpha-Me R8-octenyl-alanine olefin amino acid connected by an all-carbon crosslinker comprising one double bond
  misc_feature (4)..(11): Crosslink between residues
  MOD_RES (7)..(7): Alpha-Me-Trp
  MOD_RES (11)..(11): Alpha-Me S5-pentenyl-alanine olefin amino acid connected by an all-carbon crosslinker comprising one double bond
  MOD_RES (14)..(14): Norleucine
  C-term NH2
LTFAAYWAQLAAALA

SEQ ID NO: 389 - protein, 15 aa, Artificial Sequence
  Description of Artificial Sequence: Synthetic peptide
  N-term Ac
  MOD_RES (4)..(4): Alpha-Me R8-octenyl-alanine olefin amino acid connected by an all-carbon crosslinker comprising one double bond
  misc_feature (4)..(11): Crosslink between residues
  MOD_RES (8)..(8): 2-aminoisobutyric acid
  MOD_RES (11)..(11): Alpha-Me S5-pentenyl-alanine olefin amino acid connected by an all-carbon crosslinker comprising one double bond
  MOD_RES (14)..(14): Norleucine
  C-term NH2
LTFAAYWXQLAAALA

SEQ ID NO: 390 - protein, 15 aa, Artificial Sequence
  Description of Artificial Sequence: Synthetic peptide
  N-term Ac
  MOD_RES (4)..(4): Alpha-Me R8-octenyl-alanine olefin amino acid connected by an all-carbon crosslinker comprising one double bond
  misc_feature (4)..(11): Crosslink between residues
  MOD_RES (8)..(8): 2-aminoisobutyric acid
  MOD_RES (11)..(11): Alpha-Me S5-pentenyl-alanine olefin amino acid connected by an all-carbon crosslinker comprising one double bond
  MOD_RES (14)..(14): Norleucine
  C-term NH2
LTFAAYWXQLAAALA

SEQ ID NO: 391 - protein, 15 aa, Artificial Sequence
  Description of Artificial Sequence: Synthetic peptide
  N-term Ac
  MOD_RES (4)..(4): Alpha-Me R8-octenyl-alanine olefin amino acid connected by an all-carbon crosslinker comprising one double bond
  misc_feature (4)..(11): Crosslink between residues
  MOD_RES (11)..(11): Alpha-Me S5-pentenyl-alanine olefin amino acid connected by an all-carbon crosslinker comprising one double bond
  MOD_RES (13)..(13): 2-aminoisobutyric acid
  MOD_RES (14)..(14): Norleucine
  C-term NH2
LTFAAYWAQLAAXLA

SEQ ID NO: 392 - protein, 15 aa, Artificial Sequence
  Description of Artificial Sequence: Synthetic peptide
  N-term Ac
  MOD_RES (4)..(4): Alpha-Me R8-octenyl-alanine olefin amino acid connected by an all-carbon crosslinker comprising one double bond
  misc_feature (4)..(11): Crosslink between residues
  MOD_RES (11)..(11): Alpha-Me S5-pentenyl-alanine olefin amino acid connected by an all-carbon crosslinker comprising one double bond
  MOD_RES (13)..(13): 2-aminoisobutyric acid
  MOD_RES (14)..(14): Norleucine
  C-term NH2
LTFAAYWAQLAAXLA

SEQ ID NO: 393 - protein, 15 aa, Artificial Sequence
  Description of Artificial Sequence: Synthetic peptide
  N-term Ac
  MOD_RES (4)..(4): Alpha-Me R8-octenyl-alanine olefin amino acid connected by an all-carbon crosslinker comprising one double bond
  misc_feature (4)..(11): Crosslink between residues
  MOD_RES (11)..(11): Alpha-Me S5-pentenyl-alanine olefin amino acid connected by an all-carbon crosslinker comprising one double bond
  MOD_RES (13)..(13): D-amino acid
  MOD_RES (14)..(14): Norleucine
  C-term NH2
LTFAAYWAQLAAALA

SEQ ID NO: 394 - protein, 15 aa, Artificial Sequence
  Description of Artificial Sequence: Synthetic peptide
  N-term Ac
  MOD_RES (4)..(4): Alpha-Me R8-octenyl-alanine olefin amino acid connected by an all-carbon crosslinker comprising one double bond
  misc_feature (4)..(11): Crosslink between residues
  MOD_RES (11)..(11): Alpha-Me S5-pentenyl-alanine olefin amino acid connected by an all-carbon crosslinker comprising one double bond
  MOD_RES (13)..(13): D-amino acid
  MOD_RES (14)..(14): Norleucine
  C-term NH2
LTFAAYWAQLAAALA

SEQ ID NO: 395 - protein, 15 aa, Artificial Sequence
  Description of Artificial Sequence: Synthetic peptide
  N-term Ac
  MOD_RES (4)..(4): Alpha-Me R8-octenyl-alanine olefin amino acid connected by an all-carbon crosslinker comprising one double bond
  misc_feature (4)..(11): Crosslink between residues
  MOD_RES (11)..(11): Alpha-Me S5-pentenyl-alanine olefin amino acid connected by an all-carbon crosslinker comprising one double bond
  MOD_RES (13)..(13): Sarcosine
  MOD_RES (14)..(14): Norleucine
  C-term NH2
LTFAAYWAQLAAXLA

SEQ ID NO: 396 - protein, 15 aa, Artificial Sequence
  Description of Artificial Sequence: Synthetic peptide
  N-term Ac
  MOD_RES (4)..(4): Alpha-Me R8-octenyl-alanine olefin amino acid connected by an all-carbon crosslinker comprising one double bond
  misc_feature (4)..(11): Crosslink between residues
  MOD_RES (11)..(11): Alpha-Me S5-pentenyl-alanine olefin amino acid connected by an all-carbon crosslinker comprising one double bond
  MOD_RES (13)..(13): Sarcosine
  MOD_RES (14)..(14): Norleucine
  C-term NH2
LTFAAYWAQLAAXLA

SEQ ID NO: 397 - protein, 15 aa, Artificial Sequence
  Description of Artificial Sequence: Synthetic peptide
  N-term Ac
  MOD_RES (4)..(4): Alpha-Me R8-octenyl-alanine olefin amino acid connected by an all-carbon crosslinker comprising one double bond
  misc_feature (4)..(11): Crosslink between residues
  MOD_RES (11)..(11): Alpha-Me S5-pentenyl-alanine olefin amino acid connected by an all-carbon crosslinker comprising one double bond
  MOD_RES (14)..(14): Norleucine
  MOD_RES (15)..(15): 2-aminoisobutyric acid
  C-term NH2
LTFAAYWAQLAAALX

SEQ ID NO: 398 - protein, 15 aa, Artificial Sequence
  Description of Artificial Sequence: Synthetic peptide
  N-term Ac
  MOD_RES (4)..(4): Alpha-Me R8-octenyl-alanine olefin amino acid connected by an all-carbon crosslinker comprising one double bond
  misc_feature (4)..(11): Crosslink between residues
  MOD_RES (11)..(11): Alpha-Me S5-pentenyl-alanine olefin amino acid connected by an all-carbon crosslinker comprising one double bond
  MOD_RES (14)..(14): Norleucine
  MOD_RES (15)..(15): 2-aminoisobutyric acid
  C-term NH2
LTFAAYWAQLAAALX

SEQ ID NO: 399 - protein, 15 aa, Artificial Sequence
  Description of Artificial Sequence: Synthetic peptide
  N-term Ac
  MOD_RES (4)..(4): Alpha-Me R8-octenyl-alanine olefin amino acid connected by an all-carbon crosslinker comprising one double bond
  misc_feature (4)..(11): Crosslink between residues
  MOD_RES (11)..(11): Alpha-Me S5-pentenyl-alanine olefin amino acid connected by an all-carbon crosslinker comprising one double bond
  MOD_RES (14)..(14): Norleucine
  MOD_RES (15)..(15): N-methyl-Ala
  C-term NH2
LTFAAYWAQLAAALA

SEQ ID NO: 400 - protein, 15 aa, Artificial Sequence
  Description of Artificial Sequence: Synthetic peptide
  N-term Ac
  MOD_RES (4)..(4): Alpha-Me R8-octenyl-alanine olefin amino acid connected by an all-carbon crosslinker comprising one double bond
  misc_feature (4)..(11): Crosslink between residues
  MOD_RES (11)..(11): Alpha-Me S5-pentenyl-alanine olefin amino acid connected by an all-carbon crosslinker comprising one double bond
  MOD_RES (14)..(14): Norleucine
  MOD_RES (15)..(15): N-methyl-Ala
  C-term NH2
LTFAAYWAQLAAALA

SEQ ID NO: 401 - protein, 15 aa, Artificial Sequence
  Description of Artificial Sequence: Synthetic peptide
  N-term Ac
  MOD_RES (4)..(4): Alpha-Me R8-octenyl-alanine olefin amino acid connected by an all-carbon crosslinker comprising one double bond
  misc_feature (4)..(11): Crosslink between residues
  MOD_RES (11)..(11): Alpha-Me S5-pentenyl-alanine olefin amino acid connected by an all-carbon crosslinker comprising one double bond
  MOD_RES (14)..(14): Norleucine
  MOD_RES (15)..(15): Sarcosine
  C-term NH2
LTFAAYWAQLAAALX

SEQ ID NO: 402 - protein, 15 aa, Artificial Sequence
  Description of Artificial Sequence: Synthetic peptide
  N-term Ac
  MOD_RES (4)..(4): Alpha-Me R8-octenyl-alanine olefin amino acid connected by an all-carbon crosslinker comprising one double bond
  misc_feature (4)..(11): Crosslink between residues
  MOD_RES (11)..(11): Alpha-Me S5-pentenyl-alanine olefin amino acid connected by an all-carbon crosslinker comprising one double bond
  MOD_RES (14)..(14): Norleucine
  MOD_RES (15)..(15): Sarcosine
  C-term NH2
LTFAAYWAQLAAALX

SEQ ID NO: 403 - protein, 16 aa, Artificial Sequence
  Description of Artificial Sequence: Synthetic peptide
  N-term Ac
  MOD_RES (4)..(4): Alpha-Me R8-octenyl-alanine olefin amino acid connected by an all-carbon crosslinker comprising one double bond
  misc_feature (4)..(11): Crosslink between residues
  MOD_RES (11)..(11): Alpha-Me S5-pentenyl-alanine olefin amino acid connected by an all-carbon crosslinker comprising one double bond
  MOD_RES (14)..(14): Norleucine
  MOD_RES (16)..(16): 2-aminoisobutyric acid
  C-term NH2
LTFAAYWAQLAAALAX

SEQ ID NO: 404 - protein, 16 aa, Artificial Sequence
  Description of Artificial Sequence: Synthetic peptide
  N-term Ac
  MOD_RES (4)..(4): Alpha-Me R8-octenyl-alanine olefin amino acid connected by an all-carbon crosslinker comprising one double bond
  misc_feature (4)..(11): Crosslink between residues
  MOD_RES (11)..(11): Alpha-Me S5-pentenyl-alanine olefin amino acid connected by an all-carbon crosslinker comprising one double bond
  MOD_RES (14)..(14): Norleucine
  MOD_RES (16)..(16): 2-aminoisobutyric acid
  C-term NH2
LTFAAYWAQLAAALAX

SEQ ID NO: 405 - protein, 16 aa, Artificial Sequence
  Description of Artificial Sequence: Synthetic peptide
  N-term Ac
  MOD_RES (4)..(4): Alpha-Me R8-octenyl-alanine olefin amino acid connected by an all-carbon crosslinker comprising one double bond
  misc_feature (4)..(11): Crosslink between residues
  MOD_RES (11)..(11): Alpha-Me S5-pentenyl-alanine olefin amino acid connected by an all-carbon crosslinker comprising one double bond
  MOD_RES (14)..(14): Norleucine
  MOD_RES (16)..(16): N-methyl-Ala
  C-term NH2
LTFAAYWAQLAAALAA

SEQ ID NO: 406 - protein, 16 aa, Artificial Sequence
  Description of Artificial Sequence: Synthetic peptide
  N-term Ac
  MOD_RES (4)..(4): Alpha-Me R8-octenyl-alanine olefin amino acid connected by an all-carbon crosslinker comprising one double bond
  misc_feature (4)..(11): Crosslink between residues
  MOD_RES (11)..(11): Alpha-Me S5-pentenyl-alanine olefin amino acid connected by an all-carbon crosslinker comprising one double bond
  MOD_RES (14)..(14): Norleucine
  MOD_RES (16)..(16): N-methyl-Ala
  C-term NH2
LTFAAYWAQLAAALAA

SEQ ID NO: 407 - protein, 16 aa, Artificial Sequence
  Description of Artificial Sequence: Synthetic peptide
  N-term Ac
  MOD_RES (4)..(4): Alpha-Me R8-octenyl-alanine olefin amino acid connected by an all-carbon crosslinker comprising one double bond
  misc_feature (4)..(11): Crosslink between residues
  MOD_RES (11)..(11): Alpha-Me S5-pentenyl-alanine olefin amino acid connected by an all-carbon crosslinker comprising one double bond
  MOD_RES (14)..(14): Norleucine
  MOD_RES (16)..(16): D-amino acid
  C-term NH2
LTFAAYWAQLAAALAA

SEQ ID NO: 408 - protein, 16 aa, Artificial Sequence
  Description of Artificial Sequence: Synthetic peptide
  N-term Ac
  MOD_RES (4)..(4): Alpha-Me R8-octenyl-alanine olefin amino acid connected by an all-carbon crosslinker comprising one double bond
  misc_feature (4)..(11): Crosslink between residues
  MOD_RES (11)..(11): Alpha-Me S5-pentenyl-alanine olefin amino acid connected by an all-carbon crosslinker comprising one double bond
  MOD_RES (14)..(14): Norleucine
  MOD_RES (16)..(16): D-amino acid
  C-term NH2
LTFAAYWAQLAAALAA

SEQ ID NO: 409 - protein, 16 aa, Artificial Sequence
  Description of Artificial Sequence: Synthetic peptide
  N-term Ac
  MOD_RES (4)..(4): Alpha-Me R8-octenyl-alanine olefin amino acid connected by an all-carbon crosslinker comprising one double bond
  misc_feature (4)..(11): Crosslink between residues
  MOD_RES (11)..(11): Alpha-Me S5-pentenyl-alanine olefin amino acid connected by an all-carbon crosslinker comprising one double bond
  MOD_RES (14)..(14): Norleucine
  MOD_RES (16)..(16): Sarcosine
  C-term NH2
LTFAAYWAQLAAALAX

SEQ ID NO: 410 - protein, 16 aa, Artificial Sequence
  Description of Artificial Sequence: Synthetic peptide
  N-term Ac
  MOD_RES (4)..(4): Alpha-Me R8-octenyl-alanine olefin amino acid connected by an all-carbon crosslinker comprising one double bond
  misc_feature (4)..(11): Crosslink between residues
  MOD_RES (11)..(11): Alpha-Me S5-pentenyl-alanine olefin amino acid connected by an all-carbon crosslinker comprising one double bond
  MOD_RES (14)..(14): Norleucine
  MOD_RES (16)..(16): Sarcosine
  C-term NH2
LTFAAYWAQLAAALAX

SEQ ID NO: 411 - protein, 15 aa, Artificial Sequence
  Description of Artificial Sequence: Synthetic peptide
  N-term Ac
  MOD_RES (4)..(4): Alpha-Me R8-octenyl-alanine olefin amino acid that is not connected by a crosslinker
  MOD_RES (11)..(11): Alpha-Me S5-pentenyl-alanine olefin amino acid that is not connected by a crosslinker
  MOD_RES (14)..(14): Norleucine
  C-term NH2
LTFAAYWAQLAAALA

SEQ ID NO: 412 - protein, 15 aa, Artificial Sequence
  Description of Artificial Sequence: Synthetic peptide
  N-term Ac
  MOD_RES (4)..(4): 2-aminoisobutyric acid
  MOD_RES (11)..(11): 2-aminoisobutyric acid
  MOD_RES (14)..(14): Norleucine
  C-term NH2
LTFXAYWAQLXAALA

SEQ ID NO: 413 - protein, 15 aa, Artificial Sequence
  Description of Artificial Sequence: Synthetic peptide
  N-term Ac
  MOD_RES (4)..(4): Alpha-Me R8-octenyl-alanine olefin amino acid connected by an all-carbon crosslinker comprising one double bond
  misc_feature (4)..(11): Crosslink between residues
  MOD_RES (5)..(5): Cou4
  MOD_RES (11)..(11): Alpha-Me S5-pentenyl-alanine olefin amino acid connected by an all-carbon crosslinker comprising one double bond
  MOD_RES (14)..(14): Norleucine
  C-term NH2
LTFAXYWAQLAAALA

SEQ ID NO: 414 - protein, 15 aa, Artificial Sequence
  Description of Artificial Sequence: Synthetic peptide
  N-term Ac
  MOD_RES (4)..(4): Alpha-Me R8-octenyl-alanine olefin amino acid connected by an all-carbon crosslinker comprising one double bond
  misc_feature (4)..(11): Crosslink between residues
  MOD_RES (5)..(5): Cou4
  MOD_RES (11)..(11): Alpha-Me S5-pentenyl-alanine olefin amino acid connected by an all-carbon crosslinker comprising one double bond
  MOD_RES (14)..(14): Norleucine
  C-term NH2
LTFAXYWAQLAAALA

SEQ ID NO: 415 - protein, 15 aa, Artificial Sequence
  Description of Artificial Sequence: Synthetic peptide
  N-term Ac
  MOD_RES (4)..(4): Alpha-Me R8-octenyl-alanine olefin amino acid connected by an all-carbon crosslinker comprising one double bond
  misc_feature (4)..(11): Crosslink between residues
  MOD_RES (8)..(8): Cou4
  MOD_RES (11)..(11): Alpha-Me S5-pentenyl-alanine olefin amino acid connected by an all-carbon crosslinker comprising one double bond
  MOD_RES (14)..(14): Norleucine
  C-term NH2
LTFAAYWXQLAAALA

SEQ ID NO: 416 - protein, 15 aa, Artificial Sequence
  Description of Artificial Sequence: Synthetic peptide
  N-term Ac
  MOD_RES (4)..(4): Alpha-Me R8-octenyl-alanine olefin amino acid connected by an all-carbon crosslinker comprising one double bond
  misc_feature (4)..(11): Crosslink between residues
  MOD_RES (11)..(11): Alpha-Me S5-pentenyl-alanine olefin amino acid connected by an all-carbon crosslinker comprising one double bond
  MOD_RES (12)..(12): Cou4
  MOD_RES (14)..(14): Norleucine
  C-term NH2
LTFAAYWAQLAXALA

SEQ ID NO: 417 - protein, 15 aa, Artificial Sequence
  Description of Artificial Sequence: Synthetic peptide
  N-term Ac
  MOD_RES (4)..(4): Alpha-Me R8-octenyl-alanine olefin amino acid connected by an all-carbon crosslinker comprising one double bond
  misc_feature (4)..(11): Crosslink between residues
  MOD_RES (11)..(11): Alpha-Me S5-pentenyl-alanine olefin amino acid connected by an all-carbon crosslinker comprising one double bond
  MOD_RES (12)..(12): Cou4
  MOD_RES (14)..(14): Norleucine
  C-term NH2
LTFAAYWAQLAXALA

SEQ ID NO: 418 - protein, 15 aa, Artificial Sequence
  Description of Artificial Sequence: Synthetic peptide
  N-term Ac
  MOD_RES (4)..(4): Alpha-Me R8-octenyl-alanine olefin amino acid connected by an all-carbon crosslinker comprising one double bond
  misc_feature (4)..(11): Crosslink between residues
  MOD_RES (11)..(11): Alpha-Me S5-pentenyl-alanine olefin amino acid connected by an all-carbon crosslinker comprising one double bond
  MOD_RES (13)..(13): Cou4
  MOD_RES (14)..(14): Norleucine
  C-term NH2
LTFAAYWAQLAAXLA

SEQ ID NO: 419 - protein, 15 aa, Artificial Sequence
  Description of Artificial Sequence: Synthetic peptide
  N-term Ac
  MOD_RES (4)..(4): Alpha-Me R8-octenyl-alanine olefin amino acid connected by an all-carbon crosslinker comprising one double bond
  misc_feature (4)..(11): Crosslink between residues
  MOD_RES (11)..(11): Alpha-Me S5-pentenyl-alanine olefin amino acid connected by an all-carbon crosslinker comprising one double bond
  MOD_RES (13)..(13): Cou4
  MOD_RES (14)..(14): Norleucine
  C-term NH2
LTFAAYWAQLAAXLA

SEQ ID NO: 420 - protein, 15 aa, Artificial Sequence
  Description of Artificial Sequence: Synthetic peptide
  N-term Ac
  MOD_RES (4)..(4): Alpha-Me R8-octenyl-alanine olefin amino acid connected by an all-carbon crosslinker comprising one double bond
  misc_feature (4)..(11): Crosslink between residues
  MOD_RES (11)..(11): Alpha-Me S5-pentenyl-alanine olefin amino acid connected by an all-carbon crosslinker comprising one double bond
  MOD_RES (14)..(14): Norleucine
  C-term OH
LTFAAYWAQLAAALA

SEQ ID NO: 421 - protein, 15 aa, Artificial Sequence
  Description of Artificial Sequence: Synthetic peptide
  N-term Ac
  MOD_RES (4)..(4): Alpha-Me R8-octenyl-alanine olefin amino acid connected by an all-carbon crosslinker comprising one double bond
  misc_feature (4)..(11): Crosslink between residues
  MOD_RES (11)..(11): Alpha-Me S5-pentenyl-alanine olefin amino acid connected by an all-carbon crosslinker comprising one double bond
  MOD_RES (14)..(14): Norleucine
  C-term OH
LTFAAYWAQLAAALA

SEQ ID NO: 422 - protein, 15 aa, Artificial Sequence
  Description of Artificial Sequence: Synthetic peptide
  N-term Ac
  MOD_RES (4)..(4): Alpha-Me R8-octenyl-alanine olefin amino acid connected by an all-carbon crosslinker comprising one double bond
  misc_feature (4)..(11): Crosslink between residues
  MOD_RES (11)..(11): Alpha-Me S5-pentenyl-alanine olefin amino acid connected by an all-carbon crosslinker comprising one double bond
  MOD_RES (14)..(14): Norleucine
  C-term NHnPr
LTFAAYWAQLAAALA

SEQ ID NO: 423 - protein, 15 aa, Artificial Sequence
  Description of Artificial Sequence: Synthetic peptide
  N-term Ac
  MOD_RES (4)..(4): Alpha-Me R8-octenyl-alanine olefin amino acid connected by an all-carbon crosslinker comprising one double bond
  misc_feature (4)..(11): Crosslink between residues
  MOD_RES (11)..(11): Alpha-Me S5-pentenyl-alanine olefin amino acid connected by an all-carbon crosslinker comprising one double bond
  MOD_RES (14)..(14): Norleucine
  C-term NHnPr
LTFAAYWAQLAAALA

SEQ ID NO: 424 - protein, 15 aa, Artificial Sequence
  Description of Artificial Sequence: Synthetic peptide
  N-term Ac
  MOD_RES (4)..(4): Alpha-Me R8-octenyl-alanine olefin amino acid connected by an all-carbon crosslinker comprising one double bond
  misc_feature (4)..(11): Crosslink between residues
  MOD_RES (11)..(11): Alpha-Me S5-pentenyl-alanine olefin amino acid connected by an all-carbon crosslinker comprising one double bond
  MOD_RES (14)..(14): Norleucine
  C-term NHnBu33Me
LTFAAYWAQLAAALA

SEQ ID NO: 425 - protein, 15 aa, Artificial Sequence
  Description of Artificial Sequence: Synthetic peptide
  N-term Ac
  MOD_RES (4)..(4): Alpha-Me R8-octenyl-alanine olefin amino acid connected by an all-carbon crosslinker comprising one double bond
  misc_feature (4)..(11): Crosslink between residues
  MOD_RES (11)..(11): Alpha-Me S5-pentenyl-alanine olefin amino acid connected by an all-carbon crosslinker comprising one double bond
  MOD_RES (14)..(14): Norleucine
  C-term NHnBu33Me
LTFAAYWAQLAAALA

SEQ ID NO: 426 - protein, 15 aa, Artificial Sequence
  Description of Artificial Sequence: Synthetic peptide
  N-term Ac
  MOD_RES (4)..(4): Alpha-Me R8-octenyl-alanine olefin amino acid connected by an all-carbon crosslinker comprising one double bond
  misc_feature (4)..(11): Crosslink between residues
  MOD_RES (11)..(11): Alpha-Me S5-pentenyl-alanine olefin amino acid connected by an all-carbon crosslinker comprising one double bond
  MOD_RES (14)..(14): Norleucine
  C-term NHHex
LTFAAYWAQLAAALA

SEQ ID NO: 427 - protein, 15 aa, Artificial Sequence
  Description of Artificial Sequence: Synthetic peptide
  N-term Ac
  MOD_RES (4)..(4): Alpha-Me R8-octenyl-alanine olefin amino acid connected by an all-carbon crosslinker comprising one double bond
  misc_feature (4)..(11): Crosslink between residues
  MOD_RES (11)..(11): Alpha-Me S5-pentenyl-alanine olefin amino acid connected by an all-carbon crosslinker comprising one double bond
  MOD_RES (14)..(14): Norleucine
  C-term NHHex
LTFAAYWAQLAAALA

SEQ ID NO: 428 - protein, 15 aa, Artificial Sequence
  Description of Artificial Sequence: Synthetic peptide
  N-term Ac
  MOD_RES (4)..(4): Alpha-Me R8-octenyl-alanine olefin amino acid connected by an all-carbon crosslinker comprising one double bond
  misc_feature (4)..(11): Crosslink between residues
  MOD_RES (11)..(11): Alpha-Me S5-pentenyl-alanine olefin amino acid connected by an all-carbon crosslinker comprising one double bond
  MOD_RES (14)..(14): Norleucine
  C-term NH2
LTAAAYWAQLAAALA

SEQ ID NO: 429 - protein, 15 aa, Artificial Sequence
  Description of Artificial Sequence: Synthetic peptide
  N-term Ac
  MOD_RES (3)..(3): hLeu
  MOD_RES (4)..(4): Alpha-Me R8-octenyl-alanine olefin amino acid connected by an all-carbon crosslinker comprising one double bond
  misc_feature (4)..(11): Crosslink between residues
  MOD_RES (11)..(11): Alpha-Me S5-pentenyl-alanine olefin amino acid connected by an all-carbon crosslinker comprising one double bond
  MOD_RES (14)..(14): Norleucine
  C-term NH2
LTLAAYWAQLAAALA

SEQ ID NO: 430 - protein, 15 aa, Artificial Sequence
  Description of Artificial Sequence: Synthetic peptide
  N-term Ac
  MOD_RES (4)..(4): Alpha-Me R8-octenyl-alanine olefin amino acid connected by an all-carbon crosslinker comprising one double bond
  misc_feature (4)..(11): Crosslink between residues
  MOD_RES (11)..(11): Alpha-Me S5-pentenyl-alanine olefin amino acid connected by an all-carbon crosslinker comprising one double bond
  MOD_RES (14)..(14): Norleucine
  C-term NH2
LTFAAYAAQLAAALA

SEQ ID NO: 431 - protein, 15 aa, Artificial Sequence
  Description of Artificial Sequence: Synthetic peptide
  N-term Ac
  MOD_RES (4)..(4): Alpha-Me R8-octenyl-alanine olefin amino acid connected by an all-carbon crosslinker comprising one double bond
  misc_feature (4)..(11): Crosslink between residues
  MOD_RES (7)..(7): 2-Naphthalanine
  MOD_RES (11)..(11): Alpha-Me S5-pentenyl-alanine olefin amino acid connected by an all-carbon crosslinker comprising one double bond
  MOD_RES (14)..(14): Norleucine
  C-term NH2
LTFAAYAAQLAAALA

SEQ ID NO: 432 - protein, 14 aa, Artificial Sequence
  Description of Artificial Sequence: Synthetic peptide
  N-term Ac
  MOD_RES (4)..(4): Alpha-Me R8-octenyl-alanine olefin amino acid connected by an all-carbon crosslinker comprising one double bond
  misc_feature (4)..(11): Crosslink between residues
  MOD_RES (8)..(8): Cou4
  MOD_RES (10)..(10): Cyclobutyl-Ala
  MOD_RES (11)..(11): Alpha-Me S5-pentenyl-alanine olefin amino acid connected by an all-carbon crosslinker comprising one double bond
  C-term NH2
LTFAEYWXQAASAA

SEQ ID NO: 433 - protein, 14 aa, Artificial Sequence
  Description of Artificial Sequence: Synthetic peptide
  N-term Ac
  MOD_RES (4)..(4): Alpha-Me R8-octenyl-alanine olefin amino acid connected by an all-carbon crosslinker comprising one double bond
  misc_feature (4)..(11): Crosslink between residues
  MOD_RES (8)..(8): Cou7
  MOD_RES (10)..(10): Cyclobutyl-Ala
  MOD_RES (11)..(11): Alpha-Me S5-pentenyl-alanine olefin amino acid connected by an all-carbon crosslinker comprising one double bond
  C-term NH2
LTFAEYWXQAASAA

SEQ ID NO: 434 - protein, 14 aa, Artificial Sequence
  Description of Artificial Sequence: Synthetic peptide
  N-term Ac
  MOD_RES (4)..(4): Alpha-Me R8-octenyl-alanine olefin amino acid connected by an all-carbon crosslinker comprising no double bonds
  misc_feature (4)..(11): Crosslink between residues
  MOD_RES (10)..(10): Cyclobutyl-Ala
  MOD_RES (11)..(11): Alpha-Me S5-pentenyl-alanine olefin amino acid connected by an all-carbon saturated crosslinker comprising no double bonds
  C-term NH2
LTFAEYWAQAASAA

SEQ ID NO: 435 - protein, 14 aa, Artificial Sequence
  Description of Artificial Sequence: Synthetic peptide
  N-term Dmaac
  MOD_RES (4)..(4): Alpha-Me R8-octenyl-alanine olefin amino acid connected by an all-carbon crosslinker comprising one double bond
  misc_feature (4)..(11): Crosslink between residues
  MOD_RES (10)..(10): Cyclobutyl-Ala
  MOD_RES (11)..(11): Alpha-Me S5-pentenyl-alanine olefin amino acid connected by an all-carbon crosslinker comprising one double bond
  C-term NH2
LTFAEYWAQAASAA

SEQ ID NO: 436 - protein, 17 aa, Artificial Sequence
  Description of Artificial Sequence: Synthetic peptide
  N-term Dmaac
  MOD_RES (4)..(4): Alpha-Me R8-octenyl-alanine olefin amino acid connected by an all-carbon crosslinker comprising one double bond
  misc_feature (4)..(11): Crosslink between residues
  MOD_RES (11)..(11): Alpha-Me S5-pentenyl-alanine olefin amino acid connected by an all-carbon crosslinker comprising one double bond
  MOD_RES (17)..(17): D-amino acid
  C-term NH2
LTFAAYWAQLAAAAAAA

SEQ ID NO: 437 - protein, 17 aa, Artificial Sequence
  Description of Artificial Sequence: Synthetic peptide
  N-term Dmaac
  MOD_RES (4)..(4): Alpha-Me R8-octenyl-alanine olefin amino acid connected by an all-carbon crosslinker comprising one double bond
  misc_feature (4)..(11): Crosslink between residues
  MOD_RES (11)..(11): Alpha-Me S5-pentenyl-alanine olefin amino acid connected by an all-carbon crosslinker comprising one double bond
  MOD_RES (17)..(17): D-amino acid
  C-term NH2
LTFAAYWAQLAAAAAAA

SEQ ID NO: 438 - protein, 17 aa, Artificial Sequence
  Description of Artificial Sequence: Synthetic peptide
  N-term Dmaac
  MOD_RES (4)..(4): Alpha-Me R8-octenyl-alanine olefin amino acid connected by an all-carbon crosslinker comprising one double bond
  misc_feature (4)..(11): Crosslink between residues
  MOD_RES (11)..(11): Alpha-Me S5-pentenyl-alanine olefin amino acid connected by an all-carbon crosslinker comprising one double bond
  MOD_RES (17)..(17): D-amino acid
  C-term NH2
LTFAEYWAQLAAAAAAA

SEQ ID NO: 439 - protein, 17 aa, Artificial Sequence
  Description of Artificial Sequence: Synthetic peptide
  N-term Dmaac
  MOD_RES (4)..(4): Alpha-Me R8-octenyl-alanine olefin amino acid connected by an all-carbon crosslinker comprising one double bond
  misc_feature (4)..(11): Crosslink between residues
  MOD_RES (11)..(11): Alpha-Me S5-pentenyl-alanine olefin amino acid connected by an all-carbon crosslinker comprising one double bond
  MOD_RES (17)..(17): D-amino acid
  C-term NH2
LTFAEYWAQLAAAAAAA

SEQ ID NO: 440 - protein, 15 aa, Artificial Sequence
  Description of Artificial Sequence: Synthetic peptide
  N-term Dmaac
  MOD_RES (4)..(4): Alpha-Me R8-octenyl-alanine olefin amino acid connected by an all-carbon crosslinker comprising one double bond
  misc_feature (4)..(11): Crosslink between residues
  MOD_RES (6)..(6): 4-carboxy Phe
  MOD_RES (10)..(10): Cyclobutyl-Ala
  MOD_RES (11)..(11): Alpha-Me S5-pentenyl-alanine olefin amino acid connected by an all-carbon crosslinker comprising one double bond
  MOD_RES (15)..(15): D-amino acid
  C-term NH2
LTFAEFWAQAAAAIA

SEQ ID NO: 441 - protein, 15 aa, Artificial Sequence
  Description of Artificial Sequence: Synthetic peptide
  N-term Dmaac
  MOD_RES (4)..(4): Alpha-Me R8-octenyl-alanine olefin amino acid connected by an all-carbon crosslinker comprising one double bond
  misc_feature (4)..(11): Crosslink between residues
  MOD_RES (6)..(6): 4-carboxy Phe
  MOD_RES (10)..(10): Cyclobutyl-Ala
  MOD_RES (11)..(11): Alpha-Me S5-pentenyl-alanine olefin amino acid connected by an all-carbon crosslinker comprising one double bond
  MOD_RES (15)..(15): D-amino acid
  C-term NH2
LTFAEFWAQAAAAIA

SEQ ID NO: 442 - protein, 15 aa, Artificial Sequence
  Description of Artificial Sequence: Synthetic peptide
  N-term Dmaac
  MOD_RES (4)..(4): Alpha-Me R8-octenyl-alanine olefin amino acid connected by an all-carbon crosslinker comprising one double bond
  misc_feature (4)..(11): Crosslink between residues
  MOD_RES (11)..(11): Alpha-Me S5-pentenyl-alanine olefin amino acid connected by an all-carbon crosslinker comprising one double bond
  MOD_RES (14)..(14): Norleucine
  C-term NH2
LTFAAYWAQLAAALA

SEQ ID NO: 443 - protein, 15 aa, Artificial Sequence
  Description of Artificial Sequence: Synthetic peptide
  N-term Dmaac
  MOD_RES (4)..(4): Alpha-Me R8-octenyl-alanine olefin amino acid connected by an all-carbon crosslinker comprising one double bond
  misc_feature (4)..(11): Crosslink between residues
  MOD_RES (11)..(11): Alpha-Me S5-pentenyl-alanine olefin amino acid connected by an all-carbon crosslinker comprising one double bond
  MOD_RES (14)..(14): Norleucine
  C-term NH2
LTFAAYWAQLAAALA

SEQ ID NO: 444 - protein, 15 aa, Artificial Sequence
  Description of Artificial Sequence: Synthetic peptide
  N-term Ac
  MOD_RES (4)..(4): Alpha-Me R8-octenyl-alanine olefin amino acid connected by an all-carbon crosslinker comprising no double bonds
  misc_feature (4)..(11): Crosslink between residues
  MOD_RES (11)..(11): Alpha-Me S5-pentenyl-alanine olefin amino acid connected by an all-carbon crosslinker comprising no double bonds
  MOD_RES (14)..(14): Norleucine
  C-term NH2
LTFAAYWAQLAAALA

SEQ ID NO: 445 - protein, 17 aa, Artificial Sequence
  Description of Artificial Sequence: Synthetic peptide
  N-term Ac
  MOD_RES (4)..(4): Alpha-Me R8-octenyl-alanine olefin amino acid connected by an all-carbon crosslinker comprising no double bonds
  misc_feature (4)..(11): Crosslink between residues
  MOD_RES (11)..(11): Alpha-Me S5-pentenyl-alanine olefin amino acid connected by an all-carbon crosslinker comprising no double bonds
  MOD_RES (17)..(17): D-amino acid
  C-term NH2
LTFAEYWAQLAAAAAAA

SEQ ID NO: 446 - protein, 16 aa, Artificial Sequence
  Description of Artificial Sequence: Synthetic peptide
  MOD_RES (1)..(1): Cou6
  MOD_RES (2)..(2): Beta-Ala
  MOD_RES (6)..(6): Alpha-Me R8-octenyl-alanine olefin amino acid connected by an all-carbon crosslinker comprising one double bond
  misc_feature (6)..(13): Crosslink between residues
  MOD_RES (12)..(12): hLeu
  MOD_RES (13)..(13): Alpha-Me S5-pentenyl-alanine olefin amino acid connected by an all-carbon crosslinker comprising one double bond
  C-term NH2
XALTFAEYWAQLASAA

SEQ ID NO: 447 - protein, 16 aa, Artificial Sequence
  Description of Artificial Sequence: Synthetic peptide
  MOD_RES (1)..(1): Cou8
  MOD_RES (2)..(2): Beta-Ala
  MOD_RES (6)..(6): Alpha-Me R8-octenyl-alanine olefin amino acid connected by an all-carbon crosslinker comprising one double bond
  misc_feature (6)..(13): Crosslink between residues
  MOD_RES (12)..(12): hLeu
  MOD_RES (13)..(13): Alpha-Me S5-pentenyl-alanine olefin amino acid connected by an all-carbon crosslinker comprising one double bond
  C-term NH2
XALTFAEYWAQLASAA

SEQ ID NO: 448 - protein, 17 aa, Artificial Sequence
  Description of Artificial Sequence: Synthetic peptide
  N-term Ac
  MOD_RES (3)..(3): 4-iodo-Phe
  MOD_RES (4)..(4): Alpha-Me R8-octenyl-alanine olefin amino acid connected by an all-carbon crosslinker comprising one double bond
  misc_feature (4)..(11): Crosslink between residues
  MOD_RES (11)..(11): Alpha-Me S5-pentenyl-alanine olefin amino acid connected by an all-carbon crosslinker comprising one double bond
  MOD_RES (17)..(17): D-amino acid
  C-term NH2
LTFAEYWAQLAAAAAAA

SEQ ID NO: 449 - protein, 17 aa, Artificial Sequence
  Description of Artificial Sequence: Synthetic peptide
  N-term Ac
  MOD_RES (4)..(4): Alpha-Me R8-octenyl-alanine olefin amino acid connected by an all-carbon crosslinker comprising one double bond
  misc_feature (4)..(11): Crosslink between residues
  MOD_RES (11)..(11): Alpha-Me S5-pentenyl-alanine olefin amino acid connected by an all-carbon crosslinker comprising one double bond
  MOD_RES (17)..(17): D-amino acid
  C-term NH2
LTFAEYWAQLAAAAAAA

SEQ ID NO: 450 - protein, 17 aa, Artificial Sequence
  Description of Artificial Sequence: Synthetic peptide
  N-term Ac
  MOD_RES (4)..(4): Alpha-Me R8-octenyl-alanine olefin amino acid connected by an all-carbon crosslinker comprising one double bond
  misc_feature (4)..(11): Crosslink between residues
  MOD_RES (11)..(11): Alpha-Me S5-pentenyl-alanine olefin amino acid connected by an all-carbon crosslinker comprising one double bond
  MOD_RES (17)..(17): D-amino acid
  C-term OH
LTFAEYWAQLAAAAAAA

SEQ ID NO: 451 - protein, 17 aa, Artificial Sequence
  Description of Artificial Sequence: Synthetic peptide
  N-term Ac
  MOD_RES (4)..(4): Alpha-Me R8-octenyl-alanine olefin amino acid connected by an all-carbon crosslinker comprising one double bond
  misc_feature (4)..(11): Crosslink between residues
  MOD_RES (11)..(11): Alpha-Me S5-pentenyl-alanine olefin amino acid connected by an all-carbon crosslinker comprising one double bond
  MOD_RES (17)..(17): D-amino acid
  C-term OH
LTFAEYWAQLAAAAAAA

SEQ ID NO: 452 - protein, 17 aa, Artificial Sequence
  Description of Artificial Sequence: Synthetic peptide
  N-term Ac
  MOD_RES (4)..(4): Alpha-Me R8-octenyl-alanine olefin amino acid connected by an all-carbon crosslinker comprising one double bond
  misc_feature (4)..(11): Crosslink between residues
  MOD_RES (11)..(11): Alpha-Me S5-pentenyl-alanine olefin amino acid connected by an all-carbon crosslinker comprising one double bond
  MOD_RES (17)..(17): D-amino acid
  C-term NH2
LTFAEYWAELAAAAAAA

SEQ ID NO: 453 - protein, 17 aa, Artificial Sequence
  Description of Artificial Sequence: Synthetic peptide
  N-term Ac
  MOD_RES (4)..(4): Alpha-Me R8-octenyl-alanine olefin amino acid connected by an all-carbon crosslinker comprising one double bond
  misc_feature (4)..(11): Crosslink between residues
  MOD_RES (11)..(11): Alpha-Me S5-pentenyl-alanine olefin amino acid connected by an all-carbon crosslinker comprising one double bond
  MOD_RES (17)..(17): D-amino acid
  C-term NH2
LTFAEYWAELAAAAAAA

SEQ ID NO: 454 - protein, 17 aa, Artificial Sequence
  Description of Artificial Sequence: Synthetic peptide
  N-term Ac
  MOD_RES (4)..(4): Alpha-Me R8-octenyl-alanine olefin amino acid connected by an all-carbon crosslinker comprising one double bond
  misc_feature (4)..(11): Crosslink between residues
  MOD_RES (11)..(11): Alpha-Me S5-pentenyl-alanine olefin amino acid connected by an all-carbon crosslinker comprising one double bond
  MOD_RES (17)..(17): D-amino acid
  C-term OH
LTFAEYWAELAAAAAAA

SEQ ID NO: 455 - protein, 17 aa, Artificial Sequence
  Description of Artificial Sequence: Synthetic peptide
  N-term Ac
  MOD_RES (4)..(4): Alpha-Me R8-octenyl-alanine olefin amino acid connected by an all-carbon crosslinker comprising one double bond
  misc_feature (4)..(11): Crosslink between residues
  MOD_RES (7)..(7): 6cl-Trp
  MOD_RES (11)..(11): Alpha-Me S5-pentenyl-alanine olefin amino acid connected by an all-carbon crosslinker comprising one double bond
  MOD_RES (17)..(17): D-amino acid
  C-term NH2
LTFAEYWAQLAAAAAAA

SEQ ID NO: 456 - protein, 17 aa, Artificial Sequence
  Description of Artificial Sequence: Synthetic peptide
  N-term Ac
  MOD_RES (4)..(4): Alpha-Me R8-octenyl-alanine olefin amino acid connected by an all-carbon crosslinker comprising one double bond
  misc_feature (4)..(11): Crosslink between residues
  MOD_RES (6)..(6): Phe-4bOH2
  MOD_RES (11)..(11): Alpha-Me S5-pentenyl-alanine olefin amino acid connected by an all-carbon crosslinker comprising one double bond
  MOD_RES (17)..(17): D-amino acid
  C-term NH2
LTFAEFWAQLAAAAAAA

SEQ ID NO: 457 - protein, 20 aa, Artificial Sequence
  Description of Artificial Sequence: Synthetic peptide
  N-term Ac
  MOD_RES (7)..(7): Alpha-Me R8-octenyl-alanine olefin amino acid connected by an all-carbon crosslinker comprising one double bond
  misc_feature (7)..(14): Crosslink between residues
  MOD_RES (14)..(14): Alpha-Me S5-pentenyl-alanine olefin amino acid connected by an all-carbon crosslinker comprising one double bond
  MOD_RES (20)..(20): D-amino acid
  C-term NH2
AAALTFAEYWAQLAAAAAAA

SEQ ID NO: 458 - protein, 17 aa, Artificial Sequence
  Description of Artificial Sequence: Synthetic peptide
  N-term Ac
  MOD_RES (3)..(3): 3,4-difluoro Phe
  MOD_RES (4)..(4): Alpha-Me R8-octenyl-alanine olefin amino acid connected by an all-carbon crosslinker comprising one double bond
  misc_feature (4)..(11): Crosslink between residues
  MOD_RES (11)..(11): Alpha-Me S5-pentenyl-alanine olefin amino acid connected by an all-carbon crosslinker comprising one double bond
  MOD_RES (17)..(17): D-amino acid
  C-term NH2
LTFAEYWAQLAAAAAAA

SEQ ID NO: 459 - protein, 17 aa, Artificial Sequence
  Description of Artificial Sequence: Synthetic peptide
  N-term Ac
  MOD_RES (4)..(4): Alpha-Me R8-octenyl-alanine olefin amino acid connected by an all-carbon crosslinker comprising one double bond
  misc_feature (4)..(11): Crosslink between residues
  MOD_RES (11)..(11): Alpha-Me S5-pentenyl-alanine olefin amino acid connected by an all-carbon crosslinker comprising one double bond
  MOD_RES (17)..(17): D-amino acid
  C-term NH2
RTFAEYWAQLAAAAAAA

SEQ ID NO: 460 - protein, 17 aa, Artificial Sequence
  Description of Artificial Sequence: Synthetic peptide
  N-term Ac
  MOD_RES (4)..(4): Alpha-Me R8-octenyl-alanine olefin amino acid connected by an all-carbon crosslinker comprising one double bond
  misc_feature (4)..(11): Crosslink between residues
  MOD_RES (11)..(11): Alpha-Me S5-pentenyl-alanine olefin amino acid connected by an all-carbon crosslinker comprising one double bond
  MOD_RES (17)..(17): D-amino acid
  C-term NH2
LTAAEYWAQLAAAAAAA

SEQ ID NO: 461 - protein, 17 aa, Artificial Sequence
  Description of Artificial Sequence: Synthetic peptide
  N-term Ac
  MOD_RES (4)..(4): Alpha-Me R8-octenyl-alanine olefin amino acid connected by an all-carbon crosslinker comprising one double bond
  misc_feature (4)..(11): Crosslink between residues
  MOD_RES (8)..(8): 2-aminoisobutyric acid
  MOD_RES (11)..(11): Alpha-Me S5-pentenyl-alanine olefin amino acid connected by an all-carbon crosslinker comprising one double bond
  MOD_RES (17)..(17): D-amino acid
  C-term NH2
LTFAEYWXQLAAAAAAA

SEQ ID NO: 462 - protein, 17 aa, Artificial Sequence
  Description of Artificial Sequence: Synthetic peptide
  N-term Ac
  MOD_RES (4)..(4): Alpha-Me R8-octenyl-alanine olefin amino acid connected by an all-carbon crosslinker comprising one double bond
  misc_feature (4)..(11): Crosslink between residues
  MOD_RES (11)..(11): Alpha-Me S5-pentenyl-alanine olefin amino acid connected by an all-carbon crosslinker comprising one double bond
  MOD_RES (13)..(13): 2-aminoisobutyric acid
  MOD_RES (17)..(17): D-amino acid
  C-term NH2
LTFAEYWAQLAAXAAAA

SEQ ID NO: 463 - protein, 17 aa, Artificial Sequence
  Description of Artificial Sequence: Synthetic peptide
  N-term Ac
  MOD_RES (4)..(4): Alpha-Me R8-octenyl-alanine olefin amino acid connected by an all-carbon crosslinker comprising one double bond
  misc_feature (4)..(11): Crosslink between residues
  MOD_RES (11)..(11): Alpha-Me S5-pentenyl-alanine olefin amino acid connected by an all-carbon crosslinker comprising one double bond
  MOD_RES (14)..(14): 2-aminoisobutyric acid
  MOD_RES (17)..(17): D-amino acid
  C-term NH2
LTFAEYWAQLAAAXAAA

SEQ ID NO: 464 - protein, 17 aa, Artificial Sequence
  Description of Artificial Sequence: Synthetic peptide
  N-term Ac
  MOD_RES (4)..(4): Alpha-Me R8-octenyl-alanine olefin amino acid connected by an all-carbon crosslinker comprising one double bond
  misc_feature (4)..(11): Crosslink between residues
  MOD_RES (11)..(11): Alpha-Me S5-pentenyl-alanine olefin amino acid connected by an all-carbon crosslinker comprising one double bond
  MOD_RES (15)..(15): 2-aminoisobutyric acid
  MOD_RES (17)..(17): D-amino acid
  C-term NH2
LTFAEYWAQLAAAAXAA

SEQ ID NO: 465 - protein, 17 aa, Artificial Sequence
  Description of Artificial Sequence: Synthetic peptide
  N-term Ac
  MOD_RES (4)..(4): Alpha-Me R8-octenyl-alanine olefin amino acid connected by an all-carbon crosslinker comprising one double bond
  misc_feature (4)..(11): Crosslink between residues
  MOD_RES (11)..(11): Alpha-Me S5-pentenyl-alanine olefin amino acid connected by an all-carbon crosslinker comprising one double bond
  MOD_RES (16)..(16): 2-aminoisobutyric acid
  MOD_RES (17)..(17): D-amino acid
  C-term NH2
LTFAEYWAQLAAAAAXA

SEQ ID NO: 466 - protein, 17 aa, Artificial Sequence
  Description of Artificial Sequence: Synthetic peptide
  N-term Ac
  MOD_RES (4)..(4): Alpha-Me R8-octenyl-alanine olefin amino acid connected by an all-carbon crosslinker comprising one double bond
  misc_feature (4)..(11): Crosslink between residues
  MOD_RES (11)..(11): Alpha-Me S5-pentenyl-alanine olefin amino acid connected by an all-carbon crosslinker comprising one double bond
  MOD_RES (16)..(16): 2-aminoisobutyric acid
  MOD_RES (17)..(17): D-amino acid
  C-term NH2
LTFAEYWAQLAAAAAXA

SEQ ID NO: 467 - protein, 17 aa, Artificial Sequence
  Description of Artificial Sequence: Synthetic peptide
  N-term Ac
  MOD_RES (4)..(4): Alpha-Me R8-octenyl-alanine olefin amino acid connected by an all-carbon crosslinker comprising one double bond
  misc_feature (4)..(11): Crosslink between residues
  MOD_RES (11)..(11): Alpha-Me S5-pentenyl-alanine olefin amino acid connected by an all-carbon crosslinker comprising one double bond
  MOD_RES (17)..(17): 2-aminoisobutyric acid
  C-term NH2
LTFAEYWAQLAAAAAAX

SEQ ID NO: 468 - protein, 17 aa, Artificial Sequence
  Description of Artificial Sequence: Synthetic peptide
  N-term Ac
  MOD_RES (4)..(4): Alpha-Me R8-octenyl-alanine olefin amino acid connected by an all-carbon crosslinker comprising one double bond
  misc_feature (4)..(11): Crosslink between residues
  MOD_RES (11)..(11): Alpha-Me S5-pentenyl-alanine olefin amino acid connected by an all-carbon crosslinker comprising one double bond
  MOD_RES (13)..(13): D-amino acid
  MOD_RES (17)..(17): D-amino acid
  C-term NH2
LTFAEYWAQLAAAAAAA

SEQ ID NO: 469 - protein, 17 aa, Artificial Sequence
  Description of Artificial Sequence: Synthetic peptide
  N-term Ac
  MOD_RES (4)..(4): Alpha-Me R8-octenyl-alanine olefin amino acid connected by an all-carbon crosslinker comprising one double bond
  misc_feature (4)..(11): Crosslink between residues
  MOD_RES (11)..(11): Alpha-Me S5-pentenyl-alanine olefin amino acid connected by an all-carbon crosslinker comprising one double bond
  MOD_RES (14)..(14): D-amino acid
  MOD_RES (17)..(17): D-amino acid
  C-term NH2
LTFAEYWAQLAAAAAAA

SEQ ID NO: 470 - protein, 17 aa, Artificial Sequence
  Description of Artificial Sequence: Synthetic peptide
  N-term Ac
  MOD_RES (4)..(4): Alpha-Me R8-octenyl-alanine olefin amino acid connected by an all-carbon crosslinker comprising one double bond
  misc_feature (4)..(11): Crosslink between residues
  MOD_RES (11)..(11): Alpha-Me S5-pentenyl-alanine olefin amino acid connected by an all-carbon crosslinker comprising one double bond
  MOD_RES (15)..(15): D-amino acid
  MOD_RES (17)..(17): D-amino acid
  C-term NH2
LTFAEYWAQLAAAAAAA

SEQ ID NO: 471 - protein, 17 aa, Artificial Sequence
  Description of Artificial Sequence: Synthetic peptide
  N-term Ac
  MOD_RES (4)..(4): Alpha-Me R8-octenyl-alanine olefin amino acid connected by an all-carbon crosslinker comprising one double bond
  misc_feature (4)..(11): Crosslink between residues
  MOD_RES (11)..(11): Alpha-Me S5-pentenyl-alanine olefin amino acid connected by an all-carbon crosslinker comprising one double bond
  MOD_RES (15)..(15): D-amino acid
  MOD_RES (17)..(17): D-amino acid
  C-term NH2
LTFAEYWAQLAAAAAAA

SEQ ID NO: 472 - protein, 17 aa, Artificial Sequence
  Description of Artificial Sequence: Synthetic peptide
  N-term Ac
  MOD_RES (4)..(4): Alpha-Me R8-octenyl-alanine olefin amino acid connected by an all-carbon crosslinker comprising one double bond
  misc_feature (4)..(11): Crosslink between residues
  MOD_RES (11)..(11): Alpha-Me S5-pentenyl-alanine olefin amino acid connected by an all-carbon crosslinker comprising one double bond
  MOD_RES (16)..(17): D-amino acid
  C-term NH2
LTFAEYWAQLAAAAAAA

SEQ ID NO: 473 - protein, 17 aa, Artificial Sequence
  Description of Artificial Sequence: Synthetic peptide
  N-term Ac
  MOD_RES (4)..(4): Alpha-Me R8-octenyl-alanine olefin amino acid connected by an all-carbon crosslinker comprising one double bond
  misc_feature (4)..(11): Crosslink between residues
  MOD_RES (11)..(11): Alpha-Me S5-pentenyl-alanine olefin amino acid connected by an all-carbon crosslinker comprising one double bond
  C-term NH2
LTFAEYWAQLAAAAAAA

SEQ ID NO: 474 - protein, 17 aa, Artificial Sequence
  Description of Artificial Sequence: Synthetic peptide
  N-term Ac
  MOD_RES (4)..(4): Alpha-Me R8-octenyl-alanine olefin amino acid connected by an all-carbon crosslinker comprising one double bond
  misc_feature (4)..(11): Crosslink between residues
  MOD_RES (11)..(11): Alpha-Me S5-pentenyl-alanine olefin amino acid connected by an all-carbon crosslinker comprising one double bond
  MOD_RES (13)..(13): Sarcosine
  MOD_RES (17)..(17): D-amino acid
  C-term NH2
LTFAEYWAQLAAXAAAA

SEQ ID NO: 475 - protein, 17 aa, Artificial Sequence
  Description of Artificial Sequence: Synthetic peptide
  N-term Ac
  MOD_RES (4)..(4): Alpha-Me R8-octenyl-alanine olefin amino acid connected by an all-carbon crosslinker comprising one double bond
  misc_feature (4)..(11): Crosslink between residues
  MOD_RES (11)..(11): Alpha-Me S5-pentenyl-alanine olefin amino acid connected by an all-carbon crosslinker comprising one double bond
  MOD_RES (14)..(14): Sarcosine
  MOD_RES (17)..(17): D-amino acid
  C-term NH2
LTFAEYWAQLAAAXAAA

SEQ ID NO: 476 - protein, 17 aa, Artificial Sequence
  Description of Artificial Sequence: Synthetic peptide
  N-term Ac
  MOD_RES (4)..(4): Alpha-Me R8-octenyl-alanine olefin amino acid connected by an all-carbon crosslinker comprising one double bond
  misc_feature (4)..(11): Crosslink between residues
  MOD_RES (11)..(11): Alpha-Me S5-pentenyl-alanine olefin amino acid connected by an all-carbon crosslinker comprising one double bond
  MOD_RES (15)..(15): Sarcosine
  MOD_RES (17)..(17): D-amino acid
  C-term NH2
LTFAEYWAQLAAAAXAA

SEQ ID NO: 477 - protein, 17 aa, Artificial Sequence
  Description of Artificial Sequence: Synthetic peptide
  N-term Ac
  MOD_RES (4)..(4): Alpha-Me R8-octenyl-alanine olefin amino acid connected by an all-carbon crosslinker comprising one double bond
  misc_feature (4)..(11): Crosslink between residues
  MOD_RES (11)..(11): Alpha-Me S5-pentenyl-alanine olefin amino acid connected by an all-carbon crosslinker comprising one double bond
  MOD_RES (16)..(16): Sarcosine
  MOD_RES (17)..(17): D-amino acid
  C-term NH2
LTFAEYWAQLAAAAAXA

SEQ ID NO: 478 - protein, 17 aa, Artificial Sequence
  Description of Artificial Sequence: Synthetic peptide
  N-term Ac
  MOD_RES (4)..(4): Alpha-Me R8-octenyl-alanine olefin amino acid connected by an all-carbon crosslinker comprising one double bond
  misc_feature (4)..(11): Crosslink between residues
  MOD_RES (11)..(11): Alpha-Me S5-pentenyl-alanine olefin amino acid connected by an all-carbon crosslinker comprising one double bond
  MOD_RES (17)..(17): Sarcosine
  C-term NH2
LTFAEYWAQLAAAAAAX

SEQ ID NO: 479 - protein, 17 aa, Artificial Sequence
  Description of Artificial Sequence: Synthetic peptide
  N-term Ac
  MOD_RES (1)..(1): N15 isotopic-Leu
  MOD_RES (4)..(4): Alpha-Me R8-octenyl-alanine olefin amino acid connected by an all-carbon crosslinker comprising one double bond
  misc_feature (4)..(11): Crosslink between residues
  MOD_RES (11)..(11): Alpha-Me S5-pentenyl-alanine olefin amino acid connected by an all-carbon crosslinker comprising one double bond
  MOD_RES (17)..(17): D-amino acid
  C-term NH2
LTFAEYWAQLAAAAAAA

SEQ ID NO: 480 - protein, 16 aa, Artificial Sequence
  Description of Artificial Sequence: Synthetic peptide
  N-term Ac
  MOD_RES (3)..(3): Alpha-Me R8-octenyl-alanine olefin amino acid connected by an all-carbon crosslinker comprising one double bond
  misc_feature (3)..(10): Crosslink between residues
  MOD_RES (10)..(10): Alpha-Me S5-pentenyl-alanine olefin amino acid connected by an all-carbon crosslinker comprising one double bond
  MOD_RES (16)..(16): D-amino acid
  C-term NH2
TFAEYWAQLAAAAAAA

SEQ ID NO: 481 - protein, 15 aa, Artificial Sequence
  Description of Artificial Sequence: Synthetic peptide
  N-term Ac
  MOD_RES (2)..(2): Alpha-Me R8-octenyl-alanine olefin amino acid connected by an all-carbon crosslinker comprising one double bond
  misc_feature (2)..(9): Crosslink between residues
  MOD_RES (9)..(9): Alpha-Me S5-pentenyl-alanine olefin amino acid connected by an all-carbon crosslinker comprising one double bond
  MOD_RES (15)..(15): D-amino acid
  C-term NH2
FAEYWAQLAAAAAAA

SEQ ID NO: 482 - protein, 17 aa, Artificial Sequence
  Description of Artificial Sequence: Synthetic peptide
  N-term Ac
  MOD_RES (4)..(4): Alpha-Me R8-octenyl-alanine olefin amino acid connected by an all-carbon crosslinker comprising one double bond
  misc_feature (4)..(11): Crosslink between residues
  MOD_RES (11)..(11): Alpha-Me S5-pentenyl-alanine olefin amino acid connected by an all-carbon crosslinker comprising one double bond
  MOD_RES (17)..(17): D-amino acid
  C-term NH2
LVFAEYWAQLAAAAAAA

SEQ ID NO: 483 - protein, 17 aa, Artificial Sequence
  Description of Artificial Sequence: Synthetic peptide
  N-term Ac
  MOD_RES (4)..(4): Alpha-Me R8-octenyl-alanine olefin amino acid connected by an all-carbon crosslinker comprising one double bond
  misc_feature (4)..(11): Crosslink between residues
  MOD_RES (11)..(11): Alpha-Me S5-pentenyl-alanine olefin amino acid connected by an all-carbon crosslinker comprising one double bond
  MOD_RES (17)..(17): D-amino acid
  C-term NH2
AAFAEYWAQLAAAAAAA

SEQ ID NO: 484 - protein, 16 aa, Artificial Sequence
  Description of Artificial Sequence: Synthetic peptide
  N-term Ac
  MOD_RES (4)..(4): Alpha-Me R8-octenyl-alanine olefin amino acid connected by an all-carbon crosslinker comprising one double bond
  misc_feature (4)..(11): Crosslink between residues
  MOD_RES (11)..(11): Alpha-Me S5-pentenyl-alanine olefin amino acid connected by an all-carbon crosslinker comprising one double bond
  MOD_RES (16)..(16): D-amino acid
  C-term NH2
LTFAEYWAQLAAAAAA

SEQ ID NO: 485 - protein, 15 aa, Artificial Sequence
  Description of Artificial Sequence: Synthetic peptide
  N-term Ac
  MOD_RES (4)..(4): Alpha-Me R8-octenyl-alanine olefin amino acid connected by an all-carbon crosslinker comprising one double bond
  misc_feature (4)..(11): Crosslink between residues
  MOD_RES (11)..(11): Alpha-Me S5-pentenyl-alanine olefin amino acid connected by an all-carbon crosslinker comprising one double bond
  MOD_RES (15)..(15): D-amino acid
  C-term NH2
LTFAEYWAQLAAAAA

SEQ ID NO: 486 - protein, 14 aa, Artificial Sequence
  Description of Artificial Sequence: Synthetic peptide
  N-term Ac
  MOD_RES (4)..(4): Alpha-Me R8-octenyl-alanine olefin amino acid connected by an all-carbon crosslinker comprising one double bond
  misc_feature (4)..(11): Crosslink between residues
  MOD_RES (11)..(11): Alpha-Me S5-pentenyl-alanine olefin amino acid connected by an all-carbon crosslinker comprising one double bond
  MOD_RES (14)..(14): D-amino acid
  C-term NH2
LTFAEYWAQLAAAA

SEQ ID NO: 487 - protein, 13 aa, Artificial Sequence
  Description of Artificial Sequence: Synthetic peptide
  N-term Ac
  MOD_RES (4)..(4): Alpha-Me R8-octenyl-alanine olefin amino acid connected by an all-carbon crosslinker comprising one double bond
  misc_feature (4)..(11): Crosslink between residues
  MOD_RES (11)..(11): Alpha-Me S5-pentenyl-alanine olefin amino acid connected by an all-carbon crosslinker comprising one double bond
  MOD_RES (13)..(13): D-amino acid
  C-term NH2
LTFAEYWAQLAAA

SEQ ID NO: 488 - protein, 12 aa, Artificial Sequence
  Description of Artificial Sequence: Synthetic peptide
  N-term Ac
  MOD_RES (4)..(4): Alpha-Me R8-octenyl-alanine olefin amino acid connected by an all-carbon crosslinker comprising one double bond
  misc_feature (4)..(11): Crosslink between residues
  MOD_RES (11)..(11): Alpha-Me S5-pentenyl-alanine olefin amino acid connected by an all-carbon crosslinker comprising one double bond
  MOD_RES (12)..(12): D-amino acid
  C-term NH2
LTFAEYWAQLAA

SEQ ID NO: 489 - protein, 14 aa, Artificial Sequence
  Description of Artificial Sequence: Synthetic peptide
  N-term Ac
  MOD_RES (4)..(4): Alpha-Me R8-octenyl-alanine olefin amino acid connected by an all-carbon crosslinker comprising one double bond
  misc_feature (4)..(11): Crosslink between residues
  MOD_RES (11)..(11): Alpha-Me S5-pentenyl-alanine olefin amino acid connected by an all-carbon crosslinker comprising one double bond
  C-term OH
LTFAEYWAQLAAAA

SEQ ID NO: 490 - protein, 12 aa, Artificial Sequence
  Description of Artificial Sequence: Synthetic peptide
  N-term Ac
  MOD_RES (4)..(4): Alpha-Me R8-octenyl-alanine olefin amino acid connected by an all-carbon crosslinker comprising one double bond
  misc_feature (4)..(11): Crosslink between residues
  MOD_RES (11)..(11): Alpha-Me S5-pentenyl-alanine olefin amino acid connected by an all-carbon crosslinker comprising one double bond
  C-term OH
LTFAEYWAQLAA

SEQ ID NO: 491 - protein, 14 aa, Artificial Sequence
  Description of Artificial Sequence: Synthetic peptide
  N-term Ac
  MOD_RES (4)..(4): Alpha-Me R8-octenyl-alanine olefin amino acid connected by an all-carbon crosslinker comprising one double bond
  misc_feature (4)..(11): Crosslink between residues
  MOD_RES (11)..(11): Alpha-Me S5-pentenyl-alanine olefin amino acid connected by an all-carbon crosslinker comprising one double bond
  C-term NH2
LTFAEYWAQLAAAA

SEQ ID NO: 492 - protein, 14 aa, Artificial Sequence
  Description of Artificial Sequence: Synthetic peptide
  N-term Ac
  MOD_RES (4)..(4): Alpha-Me R8-octenyl-alanine olefin amino acid connected by an all-carbon crosslinker comprising one double bond
  misc_feature (4)..(11): Crosslink between residues
  MOD_RES (10)..(10): Cyclobutyl-Ala
  MOD_RES (11)..(11): Alpha-Me S5-pentenyl-alanine olefin amino acid connected by an all-carbon crosslinker comprising one double bond
  C-term OH
LTFAEYWAQAASAA

SEQ ID NO: 493 - protein, 12 aa, Artificial Sequence
  Description of Artificial Sequence: Synthetic peptide
  N-term Ac
  MOD_RES (4)..(4): Alpha-Me R8-octenyl-alanine olefin amino acid connected by an all-carbon crosslinker comprising one double bond
  misc_feature (4)..(11): Crosslink between residues
  MOD_RES (10)..(10): Cyclobutyl-Ala
  MOD_RES (11)..(11): Alpha-Me S5-pentenyl-alanine olefin amino acid connected by an all-carbon crosslinker comprising one double bond
  C-term OH
LTFAEYWAQAAS

SEQ ID NO: 494 - protein, 12 aa, Artificial Sequence
  Description of Artificial Sequence: Synthetic peptide
  N-term Ac
  MOD_RES (4)..(4): Alpha-Me R8-octenyl-alanine olefin amino acid connected by an all-carbon crosslinker comprising one double bond
  misc_feature (4)..(11): Crosslink between residues
  MOD_RES (10)..(10): Cyclobutyl-Ala
  MOD_RES (11)..(11): Alpha-Me S5-pentenyl-alanine olefin amino acid connected by an all-carbon crosslinker comprising one double bond
  C-term NH2
LTFAEYWAQAAS

SEQ ID NO: 495 - protein, 17 aa, Artificial Sequence
  Description of Artificial Sequence: Synthetic peptide
  N-term 4FBzl
  MOD_RES (4)..(4): Alpha-Me R8-octenyl-alanine olefin amino acid connected by an all-carbon crosslinker comprising one double bond
  misc_feature (4)..(11): Crosslink between residues
  MOD_RES (11)..(11): Alpha-Me S5-pentenyl-alanine olefin amino acid connected by an all-carbon crosslinker comprising one double bond
  MOD_RES (17)..(17): D-amino acid
  C-term NH2
LTFAEYWAQLAAAAAAA

SEQ ID NO: 496 - protein, 14 aa, Artificial Sequence
  Description of Artificial Sequence: Synthetic peptide
  N-term 4FBzl
  MOD_RES (4)..(4): Alpha-Me R8-octenyl-alanine olefin amino acid connected by an all-carbon crosslinker comprising one double bond
  misc_feature (4)..(11): Crosslink between residues
  MOD_RES (10)..(10): Cyclobutyl-Ala
  MOD_RES (11)..(11): Alpha-Me S5-pentenyl-alanine olefin amino acid connected by an all-carbon crosslinker comprising one double bond
  C-term NH2
LTFAEYWAQAASAA

SEQ ID NO: 497 - protein, 17 aa, Artificial Sequence
  Description of Artificial Sequence: Synthetic peptide
  N-term Ac
  MOD_RES (4)..(4): Alpha-Me R8-octenyl-alanine olefin amino acid connected by an all-carbon crosslinker comprising one double bond
  misc_feature (4)..(11): Crosslink between residues
  MOD_RES (11)..(11): Alpha-Me S5-pentenyl-alanine olefin amino acid connected by an all-carbon crosslinker comprising one double bond
  MOD_RES (17)..(17): D-amino acid
  C-term NH2
LTFARYWAQLAAAAAAA

SEQ ID NO: 498 - protein, 17 aa, Artificial Sequence
  Description of Artificial Sequence: Synthetic peptide
  N-term Ac
  MOD_RES (4)..(4): Alpha-Me R8-octenyl-alanine olefin amino acid connected by an all-carbon crosslinker comprising one double bond
  misc_feature (4)..(11): Crosslink between residues
  MOD_RES (11)..(11): Alpha-Me S5-pentenyl-alanine olefin amino acid connected by an all-carbon crosslinker comprising one double bond
  MOD_RES (17)..(17): D-amino acid
  C-term NH2
LTFAHYWAQLAAAAAAA

SEQ ID NO: 499 - protein, 17 aa, Artificial Sequence
  Description of Artificial Sequence: Synthetic peptide
  N-term Ac
  MOD_RES (4)..(4): Alpha-Me R8-octenyl-alanine olefin amino acid connected by an all-carbon crosslinker comprising one double bond
  misc_feature (4)..(11): Crosslink between residues
  MOD_RES (11)..(11): Alpha-Me S5-pentenyl-alanine olefin amino acid connected by an all-carbon crosslinker comprising one double bond
  MOD_RES (17)..(17): D-amino acid
  C-term NH2
LTFAQYWAQLAAAAAAA

SEQ ID NO: 500 - protein, 17 aa, Artificial Sequence
  Description of Artificial Sequence: Synthetic peptide
  N-term Ac
  MOD_RES (4)..(4): Alpha-Me R8-octenyl-alanine olefin amino acid connected by an all-carbon crosslinker comprising one double bond
  misc_feature (4)..(11): Crosslink between residues
  MOD_RES (5)..(5): Cit
  MOD_RES (11)..(11): Alpha-Me S5-pentenyl-alanine olefin amino acid connected by an all-carbon crosslinker comprising one double bond
  MOD_RES (17)..(17): D-amino acid
  C-term NH2
LTFAXYWAQLAAAAAAA

SEQ ID NO: 501 - protein, 19 aa, Artificial Sequence
  Description of Artificial Sequence: Synthetic peptide
  N-term Ac
  MOD_RES (4)..(4): Alpha-Me R8-octenyl-alanine olefin amino acid connected by an all-carbon crosslinker comprising one double bond
  misc_feature (4)..(13): Crosslink between residues
  MOD_RES (6)..(7): D-amino acid
  MOD_RES (13)..(13): Alpha-Me S5-pentenyl-alanine olefin amino acid connected by an all-carbon crosslinker comprising one double bond
  MOD_RES (19)..(19): D-amino acid
  C-term NH2
LTFAELAYWAQLAAAAAAA

SEQ ID NO: 502 - protein, 18 aa, Artificial Sequence
  Description of Artificial Sequence: Synthetic peptide
  N-term Ac
  MOD_RES (4)..(4): Alpha-Me R8-octenyl-alanine olefin amino acid connected by an all-carbon crosslinker comprising one double bond
  misc_feature (4)..(12): Crosslink between residues
  MOD_RES (5)..(5): Phe-4
  MOD_RES (6)..(6): D-amino acid
  MOD_RES (12)..(121): Alpha-Me S5-pentenyl-alanine olefin amino acid connected by an all-carbon crosslinker comprising one double bond
  MOD_RES (18)..(18): D-amino acid
  C-term NH2
LTFAFGYWAQLAAAAAAA

SEQ ID NO: 503 - protein, 17 aa, Artificial Sequence
  Description of Artificial Sequence: Synthetic peptide
  N-term Ac
  MOD_RES (4)..(4): Alpha-Me R8-octenyl-alanine olefin amino acid connected by an all-carbon crosslinker comprising one double bond
  misc_feature (4)..(11): Crosslink between residues
  MOD_RES (5)..(5): 2m-Arg
  MOD_RES (11)..(11): Alpha-Me S5-pentenyl-alanine olefin amino acid connected by an all-carbon crosslinker comprising one double bond
  MOD_RES (17)..(17): D-amino acid
  C-term NH2
LTFARYWAQLAAAAAAA

SEQ ID NO: 504 - protein, 17 aa, Artificial Sequence
  Description of Artificial Sequence: Synthetic peptide
  N-term Ac
  MOD_RES (4)..(4): Alpha-Me R8-octenyl-alanine olefin amino acid connected by an all-carbon crosslinker comprising one double bond
  misc_feature (4)..(11): Crosslink between residues
  MOD_RES (5)..(5): ip-Lys
  MOD_RES (11)..(11): Alpha-Me S5-pentenyl-alanine olefin amino acid connected by an all-carbon crosslinker comprising one double bond
  MOD_RES (17)..(17): D-amino acid
  C-term NH2
LTFAKYWAQLAAAAAAA

SEQ ID NO: 505 - protein, 17 aa, Artificial Sequence
  Description of Artificial Sequence: Synthetic peptide
  N-term Ac
  MOD_RES (4)..(4): Alpha-Me R8-octenyl-alanine olefin amino acid connected by an all-carbon crosslinker comprising one double bond
  misc_feature (4)..(11): Crosslink between residues
  MOD_RES (5)..(5): Phe-4NH2
  MOD_RES (11)..(11): Alpha-Me S5-pentenyl-alanine olefin amino acid connected by an all-carbon crosslinker comprising one double bond
  MOD_RES (17)..(17): D-amino acid
  C-term NH2
LTFAFYWAQLAAAAAAA

SEQ ID NO: 506 - protein, 17 aa, Artificial Sequence
  Description of Artificial Sequence: Synthetic peptide
  N-term Ac
  MOD_RES (4)..(4): Alpha-Me R8-octenyl-alanine olefin amino acid connected by an all-carbon crosslinker comprising one double bond
  misc_feature (4)..(11): Crosslink between residues
  MOD_RES (11)..(11): Alpha-Me S5-pentenyl-alanine olefin amino acid connected by an all-carbon crosslinker comprising one double bond
  MOD_RES (17)..(17): D-amino acid
  C-term NH2
LTFAEYWAALAAAAAAA

SEQ ID NO: 507 - protein, 17 aa, Artificial Sequence
  Description of Artificial Sequence: Synthetic peptide
  N-term Ac
  MOD_RES (4)..(4): Alpha-Me R8-octenyl-alanine olefin amino acid connected by an all-carbon crosslinker comprising one double bond
  misc_feature (4)..(11): Crosslink between residues
  MOD_RES (11)..(11): Alpha-Me S5-pentenyl-alanine olefin amino acid connected by an all-carbon crosslinker comprising one double bond
  MOD_RES (17)..(17): D-amino acid
  C-term NH2
LTFAEYWALLAAAAAAA

SEQ ID NO: 508 - protein, 17 aa, Artificial Sequence
  Description of Artificial Sequence: Synthetic peptide
  N-term Ac
  MOD_RES (4)..(4): Alpha-Me R8-octenyl-alanine olefin amino acid connected by an all-carbon crosslinker comprising one double bond
  misc_feature (4)..(11): Crosslink between residues
  MOD_RES (9)..(9): 2-aminoisobutyric acid
  MOD_RES (11)..(11): Alpha-Me S5-pentenyl-alanine olefin amino acid connected by an all-carbon crosslinker comprising one double bond
  MOD_RES (17)..(17): D-amino acid
  C-term NH2
LTFAEYWAXLAAAAAAA

SEQ ID NO: 509 - protein, 17 aa, Artificial Sequence
  Description of Artificial Sequence: Synthetic peptide
  N-term Ac
  MOD_RES (4)..(4): Alpha-Me R8-octenyl-alanine olefin amino acid connected by an all-carbon crosslinker comprising one double bond
  misc_feature (4)..(11): Crosslink between residues
  MOD_RES (11)..(11): Alpha-Me S5-pentenyl-alanine olefin amino acid connected by an all-carbon crosslinker comprising one double bond
  MOD_RES (17)..(17): D-amino acid
  C-term NH2
LTFAEYWASLAAAAAAA

SEQ ID NO: 510 - protein, 17 aa, Artificial Sequence
  Description of Artificial Sequence: Synthetic peptide
  N-term Ac
  MOD_RES (4)..(4): Alpha-Me R8-octenyl-alanine olefin amino acid connected by an all-carbon crosslinker comprising one double bond
  misc_feature (4)..(11): Crosslink between residues
  MOD_RES (11)..(11): Alpha-Me S5-pentenyl-alanine olefin amino acid connected by an all-carbon crosslinker comprising one double bond
  MOD_RES (17)..(17): D-amino acid
  C-term NH2
LTFAEYWANLAAAAAAA

SEQ ID NO: 511 - protein, 17 aa, Artificial Sequence
  Description of Artificial Sequence: Synthetic peptide
  N-term Ac
  MOD_RES (4)..(4): Alpha-Me R8-octenyl-alanine olefin amino acid connected by an all-carbon crosslinker comprising one double bond
  misc_feature (4)..(11): Crosslink between residues
  MOD_RES (9)..(9): Cit
  MOD_RES (11)..(11): Alpha-Me S5-pentenyl-alanine olefin amino acid connected by an all-carbon crosslinker comprising one double bond
  MOD_RES (17)..(17): D-amino acid
  C-term NH2
LTFAEYWAXLAAAAAAA

SEQ ID NO: 512 - protein, 17 aa, Artificial Sequence
  Description of Artificial Sequence: Synthetic peptide
  N-term Ac
  MOD_RES (4)..(4): Alpha-Me R8-octenyl-alanine olefin amino acid connected by an all-carbon crosslinker comprising one double bond
  misc_feature (4)..(11): Crosslink between residues
  MOD_RES (11)..(11): Alpha-Me S5-pentenyl-alanine olefin amino acid connected by an all-carbon crosslinker comprising one double bond
  MOD_RES (17)..(17): D-amino acid
  C-term NH2
LTFAEYWAHLAAAAAAA

SEQ ID NO: 513 - protein, 17 aa, Artificial Sequence
  Description of Artificial Sequence: Synthetic peptide
  N-term Ac
  MOD_RES (4)..(4): Alpha-Me R8-octenyl-alanine olefin amino acid connected by an all-carbon crosslinker comprising one double bond
  misc_feature (4)..(11): Crosslink between residues
  MOD_RES (11)..(11): Alpha-Me S5-pentenyl-alanine olefin amino acid connected by an all-carbon crosslinker comprising one double bond
  MOD_RES (17)..(17): D-amino acid
  C-term NH2
LTFAEYWARLAAAAAAA

SEQ ID NO: 514 - protein, 17 aa, Artificial Sequence
  Description of Artificial Sequence: Synthetic peptide
  N-term Ac
  MOD_RES (4)..(4): Alpha-Me R8-octenyl-alanine olefin amino acid connected by an all-carbon crosslinker comprising one double bond
  MOD_RES (6)..(6): pTyr
  misc_feature (4)..(11): Crosslink between residues
  MOD_RES (11)..(11): Alpha-Me S5-pentenyl-alanine olefin amino acid connected by an all-carbon crosslinker comprising one double bond
  MOD_RES (17)..(17): D-amino acid
  C-term NH2
LTFAEYWAQLAAAAAAA

SEQ ID NO: 515 - protein, 14 aa, Artificial Sequence
  Description of Artificial Sequence: Synthetic peptide
  N-term Cbm
  MOD_RES (4)..(4): Alpha-Me R8-octenyl-alanine olefin amino acid connected by an all-carbon crosslinker comprising one double bond
  misc_feature (4)..(11): Crosslink between residues
  MOD_RES (10)..(10): Cyclobutyl-Ala
  MOD_RES (11)..(11): Alpha-Me S5-pentenyl-alanine olefin amino acid connected by an all-carbon crosslinker comprising one double bond
  C-term NH2
LTFAEYWAQAASAA

SEQ ID NO: 516 - protein, 17 aa, Artificial Sequence
  Description of Artificial Sequence: Synthetic peptide
  N-term Cbm
  MOD_RES (4)..(4): Alpha-Me R8-octenyl-alanine olefin amino acid connected by an all-carbon crosslinker comprising one double bond
  misc_feature (4)..(11): Crosslink between residues
  MOD_RES (11)..(11): Alpha-Me S5-pentenyl-alanine olefin amino acid connected by an all-carbon crosslinker comprising one double bond
  MOD_RES (17)..(17): D-amino acid
  C-term NH2
LTFAEYWAQLAAAAAAA

SEQ ID NO: 517 - protein, 17 aa, Artificial Sequence
  Description of Artificial Sequence: Synthetic peptide
  N-term Ac
  MOD_RES (4)..(4): Alpha-Me R8-octenyl-alanine olefin amino acid connected by an all-carbon crosslinker comprising one double bond
  misc_feature (4)..(11): Crosslink between residues
  MOD_RES (11)..(11): Alpha-Me S5-pentenyl-alanine olefin amino acid connected by an all-carbon crosslinker comprising one double bond
  MOD_RES (17)..(17): D-amino acid
  C-term NH2
LTFAEYWAQLASAAAAA

SEQ ID NO: 518 - protein, 17 aa, Artificial Sequence
  Description of Artificial Sequence: Synthetic peptide
  N-term Ac
  MOD_RES (4)..(4): Alpha-Me R8-octenyl-alanine olefin amino acid connected by an all-carbon crosslinker comprising one double bond
  misc_feature (4)..(11): Crosslink between residues
  MOD_RES (11)..(11): Alpha-Me S5-pentenyl-alanine olefin amino acid connected by an all-carbon crosslinker comprising one double bond
  MOD_RES (17)..(17): D-amino acid
  C-term NH2
LTFAEYWAQLAAAAASA

SEQ ID NO: 519 - protein, 17 aa, Artificial Sequence
  Description of Artificial Sequence: Synthetic peptide
  N-term Ac
  MOD_RES (4)..(4): Alpha-Me R8-octenyl-alanine olefin amino acid connected by an all-carbon crosslinker comprising one double bond
  misc_feature (4)..(11): Crosslink between residues
  MOD_RES (11)..(11): Alpha-Me S5-pentenyl-alanine olefin amino acid connected by an all-carbon crosslinker comprising one double bond
  MOD_RES (17)..(17): D-amino acid
  C-term NH2
LTFAEYWAQLASAAASA

SEQ ID NO: 520 - protein, 18 aa, Artificial Sequence
  Description of Artificial Sequence: Synthetic peptide
  N-term Ac
  MOD_RES (4)..(4): Alpha-Me R8-octenyl-alanine olefin amino acid connected by an all-carbon crosslinker comprising one double bond
  misc_feature (4)..(12): Crosslink between residues
  MOD_RES (11)..(11): Beta-Ala
  MOD_RES (12)..(12): Alpha-Me S5-pentenyl-alanine olefin amino acid connected by an all-carbon crosslinker comprising one double bond
  MOD_RES (18)..(18): D-amino acid
  C-term NH2
LTFAEYWAQTAAAAAAAA

SEQ ID NO: 521 - protein, 17 aa, Artificial Sequence
  Description of Artificial Sequence: Synthetic peptide
  N-term Ac
  MOD_RES (4)..(4): Alpha-Me R8-octenyl-alanine olefin amino acid connected by an all-carbon crosslinker comprising one double bond
  misc_feature (4)..(11): Crosslink between residues
  MOD_RES (10)..(10): Adamantyl-Gly
  MOD_RES (11)..(11): Alpha-Me S5-pentenyl-alanine olefin amino acid connected by an all-carbon crosslinker comprising one double bond
  MOD_RES (17)..(17): D-amino acid
  C-term NH2
LTFAEYWAQGAAAAAAA

SEQ ID NO: 522 - protein, 17 aa, Artificial Sequence
  Description of Artificial Sequence: Synthetic peptide
  N-term Ac
  MOD_RES (4)..(4): Alpha-Me R8-octenyl-alanine olefin amino acid connected by an all-carbon crosslinker comprising one double bond
  misc_feature (4)..(11): Crosslink between residues
  MOD_RES (10)..(10): Cyclohexyl-Ala
  MOD_RES (11)..(11): Alpha-Me S5-pentenyl-alanine olefin amino acid connected by an all-carbon crosslinker comprising one double bond
  MOD_RES (17)..(17): D-amino acid
  C-term NH2
LTFAEYWAQAAAAAAAA

SEQ ID NO: 523 - protein, 17 aa, Artificial Sequence
  Description of Artificial Sequence: Synthetic peptide
  N-term Ac
  MOD_RES (4)..(4): Alpha-Me R8-octenyl-alanine olefin amino acid connected by an all-carbon crosslinker comprising one double bond
  misc_feature (4)..(11): Crosslink between residues
  MOD_RES (10)..(10): homo-cyclohexyl-Ala
  MOD_RES (11)..(11): Alpha-Me S5-pentenyl-alanine olefin amino acid connected by an all-carbon crosslinker comprising one double bond
  MOD_RES (17)..(17): D-amino acid
  C-term NH2
LTFAEYWAQAAAAAAAA

SEQ ID NO: 524 - protein, 17 aa, Artificial Sequence
  Description of Artificial Sequence: Synthetic peptide
  N-term Ac
  MOD_RES (4)..(4): Alpha-Me R8-octenyl-alanine olefin amino acid connected by an all-carbon crosslinker comprising one double bond
  misc_feature (4)..(11): Crosslink between residues
  MOD_RES (11)..(11): Alpha-Me S5-pentenyl-alanine olefin amino acid connected by an all-carbon crosslinker comprising one double bond
  MOD_RES (17)..(17): D-amino acid
  C-term NH2
LTFAEYWAQFAAAAAAA

SEQ ID NO: 525 - protein, 17 aa, Artificial Sequence
  Description of Artificial Sequence: Synthetic peptide
  N-term Ac
  MOD_RES (4)..(4): Alpha-Me R8-octenyl-alanine olefin amino acid connected by an all-carbon crosslinker comprising one double bond
  misc_feature (4)..(11): Crosslink between residues
  MOD_RES (10)..(10): homo-Phe
  MOD_RES (11)..(11): Alpha-Me S5-pentenyl-alanine olefin amino acid connected by an all-carbon crosslinker comprising one double bond
  MOD_RES (17)..(17): D-amino acid
  C-term NH2
LTFAEYWAQFAAAAAAA

SEQ ID NO: 526 - protein, 17 aa, Artificial Sequence
  Description of Artificial Sequence: Synthetic peptide
  N-term Ac
  MOD_RES (4)..(4): Alpha-Me R8-octenyl-alanine olefin amino acid connected by an all-carbon crosslinker comprising one double bond
  misc_feature (4)..(11): Crosslink between residues
  MOD_RES (11)..(11): Alpha-Me S5-pentenyl-alanine olefin amino acid connected by an all-carbon crosslinker comprising one double bond
  MOD_RES (14)..(14): Norleucine
  MOD_RES (17)..(17): D-amino acid
  C-term NH2
LTFAEYWAQLAAALAAA

SEQ ID NO: 527 - protein, 17 aa, Artificial Sequence
  Description of Artificial Sequence: Synthetic peptide
  N-term Ac
  MOD_RES (4)..(4): Alpha-Me R8-octenyl-alanine olefin amino acid connected by an all-carbon crosslinker comprising one double bond
  misc_feature (4)..(11): Crosslink between residues
  MOD_RES (10)..(10): Adamantyl-Gly
  MOD_RES (11)..(11): Alpha-Me S5-pentenyl-alanine olefin amino acid connected by an all-carbon crosslinker comprising one double bond
  MOD_RES (14)..(14): Norleucine
  MOD_RES (17)..(17): D-amino acid
  C-term NH2
LTFAEYWAQGAAALAAA

SEQ ID NO: 528 - protein, 18 aa, Artificial Sequence
  Description of Artificial Sequence: Synthetic peptide
  N-term 4FBz
  MOD_RES (1)..(1): Beta-Ala
  MOD_RES (5)..(5): Alpha-Me R8-octenyl-alanine olefin amino acid connected by an all-carbon crosslinker comprising one double bond
  misc_feature (5)..(12): Crosslink between residues
  MOD_RES (12)..(12): Alpha-Me S5-pentenyl-alanine olefin amino acid connected by an all-carbon crosslinker comprising one double bond
  MOD_RES (18)..(18): D-amino acid
  C-term NH2
ALTFAEYWAQLAAAAAAA

SEQ ID NO: 529 - protein, 15 aa, Artificial Sequence
  Description of Artificial Sequence: Synthetic peptide
  N-term 4FBz
  MOD_RES (1)..(1): Beta-Ala
  MOD_RES (5)..(5): Alpha-Me R8-octenyl-alanine olefin amino acid connected by an all-carbon crosslinker comprising one double bond
  misc_feature (5)..(12): Crosslink between residues
  MOD_RES (11)..(11): Cyclobutyl-Ala
  MOD_RES (12)..(12): Alpha-Me S5-pentenyl-alanine olefin amino acid connected by an all-carbon crosslinker comprising one double bond
  C-term NH2
ALTFAEYWAQAASAA

SEQ ID NO: 530 - protein, 17 aa, Artificial Sequence
  Description of Artificial Sequence: Synthetic peptide
  N-term Ac
  MOD_RES (4)..(4): Alpha-Me R5-pentenyl-alanine olefin amino acid connected by an all-carbon crosslinker comprising one double bond
  misc_feature (4)..(11): Crosslink between residues
  MOD_RES (11)..(11): Alpha-Me S8-octenyl-alanine olefin amino acid connected by an all-carbon crosslinker comprising one double bond
  MOD_RES (17)..(17): D-amino acid
  C-term NH2
LTFAEYWAQLAAAAAAA

SEQ ID NO: 531 - protein, 14 aa, Artificial Sequence
  Description of Artificial Sequence: Synthetic peptide
  N-term Ac
  MOD_RES (4)..(4): Alpha-Me R5-pentenyl-alanine olefin amino acid connected by an all-carbon crosslinker comprising one double bond
  misc_feature (4)..(11): Crosslink between residues
  MOD_RES (10)..(10): Cyclobutyl-Ala
  MOD_RES (11)..(11): Alpha-Me S8-octenyl-alanine olefin amino acid connected by an all-carbon crosslinker comprising one double bond
  C-term NH2
LTFAEYWAQAASAA

SEQ ID NO: 532 - protein, 17 aa, Artificial Sequence
  Description of Artificial Sequence: Synthetic peptide
  N-term Ac
  MOD_RES (4)..(4): Alpha-Me R8-octenyl-alanine olefin amino acid connected by an all-carbon crosslinker comprising one double bond
  misc_feature (4)..(11): Crosslink between residues
  MOD_RES (11)..(11): Alpha-Me S5-pentenyl-alanine olefin amino acid connected by an all-carbon crosslinker comprising one double bond
  MOD_RES (14)..(14): hhLeu
  MOD_RES (17)..(17): D-amino acid
  C-term NH2
LTFAEYWAQLAAALAAA

SEQ ID NO: 533 - protein, 19 aa, Artificial Sequence
  Description of Artificial Sequence: Synthetic peptide
  N-term Ac
  MOD_RES (4)..(4): Alpha-Me R8-octenyl-alanine olefin amino acid connected by an all-carbon crosslinker comprising one double bond
  misc_feature (4)..(11): Crosslink between residues
  MOD_RES (11)..(11): Alpha-Me S5-pentenyl-alanine olefin amino acid connected by an all-carbon crosslinker comprising one double bond
  MOD_RES (19)..(19): D-amino acid
  C-term NH2
LTFAEYWAQLAAAAAAAAA

SEQ ID NO: 534 - protein, 20 aa, Artificial Sequence
  Description of Artificial Sequence: Synthetic peptide
  N-term Ac
  MOD_RES (4)..(4): Alpha-Me R8-octenyl-alanine olefin amino acid connected by an all-carbon crosslinker comprising one double bond
  misc_feature (4)..(11): Crosslink between residues
  MOD_RES (11)..(11): Alpha-Me S5-pentenyl-alanine olefin amino acid connected by an all-carbon crosslinker comprising one double bond
  MOD_RES (20)..(20): D-amino acid
  C-term NH2
LTFAEYWAQLAAAAAAAAAA

SEQ ID NO: 535 - protein, 21 aa, Artificial Sequence
  Description of Artificial Sequence: Synthetic peptide
  N-term Ac
  MOD_RES (4)..(4): Alpha-Me R8-octenyl-alanine olefin amino acid connected by an all-carbon crosslinker comprising one double bond
  misc_feature (4)..(11): Crosslink between residues
  MOD_RES (11)..(11): Alpha-Me S5-pentenyl-alanine olefin amino acid connected by an all-carbon crosslinker comprising one double bond
  MOD_RES (21)..(21): D-amino acid
  C-term NH2
LTFAEYWAQLAAAAAAAAAAA

SEQ ID NO: 536 - protein, 14 aa, Artificial Sequence
  Description of Artificial Sequence: Synthetic peptide
  N-term Ac
  MOD_RES (4)..(4): Alpha-Me R8-octenyl-alanine olefin amino acid connected by an all-carbon crosslinker comprising one double bond
  misc_feature (4)..(11): Crosslink between residues
  MOD_RES (10)..(10): Cyclobutyl-Ala
  MOD_RES (11)..(11): Alpha-Me S5-pentenyl-alanine olefin amino acid connected by an all-carbon crosslinker comprising one double bond
  C-term NH2
LTAAEYAAQAASAA

SEQ ID NO: 537 - protein, 17 aa, Artificial Sequence
  Description of Artificial Sequence: Synthetic peptide
  N-term Ac
  MOD_RES (4)..(4): Alpha-Me R8-octenyl-alanine olefin amino acid connected by an all-carbon crosslinker comprising one double bond
  misc_feature (4)..(11): Crosslink between residues
  MOD_RES (11)..(11): Alpha-Me S5-pentenyl-alanine olefin amino acid connected by an all-carbon crosslinker comprising one double bond
  MOD_RES (17)..(17): D-amino acid
  C-term NH2
LTAAEYAAQLAAAAAAA

SEQ ID NO: 538 - protein, 17 aa, Artificial Sequence
  Description of Artificial Sequence: Synthetic peptide
  N-term Ac
  MOD_RES (4)..(4): Alpha-Me R8-octenyl-alanine olefin amino acid connected by an all-carbon crosslinker comprising one double bond
  misc_feature (4)..(11): Crosslink between residues
  MOD_RES (6)..(6): Pmp
  MOD_RES (11)..(11): Alpha-Me S5-pentenyl-alanine olefin amino acid connected by an all-carbon crosslinker comprising one double bond
  MOD_RES (17)..(17): D-amino acid
  C-term NH2
LTFAEXWAQLAAAAAAA

SEQ ID NO: 539 - protein, 14 aa, Artificial Sequence
  Description of Artificial Sequence: Synthetic peptide
  N-term Ac
  MOD_RES (4)..(4): Alpha-Me R8-octenyl-alanine olefin amino acid connected by an all-carbon crosslinker comprising one double bond
  misc_feature (4)..(11): Crosslink between residues
  MOD_RES (6)..(6): Pmp
  MOD_RES (10)..(10): Cyclobutyl-Ala
  MOD_RES (11)..(11): Alpha-Me S5-pentenyl-alanine olefin amino acid connected by an all-carbon crosslinker comprising one double bond
  C-term NH2
LTFAEXWAQAASAA

SEQ ID NO: 540 - protein, 12 aa, Artificial Sequence
  Description of Artificial Sequence: Synthetic peptide
  N-term Ac
  MOD_RES (4)..(4): Alpha-Me R8-octenyl-alanine olefin amino acid connected by an all-carbon crosslinker comprising one double bond
  misc_feature (4)..(11): Crosslink between residues
  MOD_RES (11)..(11): Alpha-Me S5-pentenyl-alanine olefin amino acid connected by an all-carbon crosslinker comprising one double bond
  C-term NH2
ATFAHYWAQLAS

SEQ ID NO: 541 - protein, 12 aa, Artificial Sequence
  Description of Artificial Sequence: Synthetic peptide
  N-term Ac
  MOD_RES (4)..(4): Alpha-Me R8-octenyl-alanine olefin amino acid connected by an all-carbon crosslinker comprising one double bond
  misc_feature (4)..(11): Crosslink between residues
  MOD_RES (11)..(11): Alpha-Me S5-pentenyl-alanine olefin amino acid connected by an all-carbon crosslinker comprising one double bond
  C-term NH2
LTFAHAWAQLAS

SEQ ID NO: 542 - protein, 12 aa, Artificial Sequence
  Description of Artificial Sequence: Synthetic peptide
  N-term Ac
  MOD_RES (4)..(4): Alpha-Me R8-octenyl-alanine olefin amino acid connected by an all-carbon crosslinker comprising one double bond
  misc_feature (4)..(11): Crosslink between residues
  MOD_RES (11)..(11): Alpha-Me S5-pentenyl-alanine olefin amino acid connected by an all-carbon crosslinker comprising one double bond
  C-term NH2
LTFAHYWAQAAS

SEQ ID NO: 543 - protein, 13 aa, Artificial Sequence
  Description of Artificial Sequence: Synthetic peptide
  N-term Ac
  MOD_RES (4)..(4): Alpha-Me R8-octenyl-alanine olefin amino acid connected by an all-carbon crosslinker comprising one double bond
  misc_feature (4)..(11): Crosslink between residues
  MOD_RES (10)..(10): Cyclobutyl-Ala
  MOD_RES (11)..(11): Alpha-Me S5-pentenyl-alanine olefin amino acid connected by an all-carbon crosslinker comprising one double bond
  C-term NH2
LTFAEYWAQAASA

SEQ ID NO: 544 - protein, 14 aa, Artificial Sequence
  Description of Artificial Sequence: Synthetic peptide
  N-term Ac
  MOD_RES (4)..(4): Alpha-Me R8-octenyl-alanine olefin amino acid connected by an all-carbon crosslinker comprising one double bond
  misc_feature (4)..(11): Crosslink between residues
  MOD_RES (11)..(11): Alpha-Me S5-pentenyl-alanine olefin amino acid connected by an all-carbon crosslinker comprising one double bond
  C-term NH2
LTFAEYWAQLASAA

SEQ ID NO: 545 - protein, 14 aa, Artificial Sequence
  Description of Artificial Sequence: Synthetic peptide
  N-term Ac
  MOD_RES (4)..(4): Alpha-Me R8-octenyl-alanine olefin amino acid connected by an all-carbon crosslinker comprising one double bond
  misc_feature (4)..(11): Crosslink between residues
  MOD_RES (10)..(10): Cyclobutyl-Ala
  MOD_RES (11)..(11): Alpha-Me S5-pentenyl-alanine olefin amino acid connected by an all-carbon crosslinker comprising one double bond
  C-term NH2
LTFAHYWAQAASAA

SEQ ID NO: 546 - protein, 14 aa, Artificial Sequence
  Description of Artificial Sequence: Synthetic peptide
  N-term Ac
  MOD_RES (4)..(4): Alpha-Me R8-octenyl-alanine olefin amino acid connected by an all-carbon crosslinker comprising one double bond
  misc_feature (4)..(11): Crosslink between residues
  MOD_RES (10)..(10): Cyclobutyl-Ala
  MOD_RES (11)..(11): Alpha-Me S5-pentenyl-alanine olefin amino acid connected by an all-carbon crosslinker comprising one double bond
  C-term NH2
LTFASYWAQAASAA

SEQ ID NO: 547 - protein, 14 aa, Artificial Sequence
  Description of Artificial Sequence: Synthetic peptide
  N-term Ac
  MOD_RES (4)..(4): Alpha-Me R8-octenyl-alanine olefin amino acid connected by an all-carbon crosslinker comprising one double bond
  misc_feature (4)..(11): Crosslink between residues
  MOD_RES (10)..(10): Cyclobutyl-Ala
  MOD_RES (11)..(11): Alpha-Me S5-pentenyl-alanine olefin amino acid connected by an all-carbon crosslinker comprising one double bond
  C-term NH2
LTFARYWAQAASAA

SEQ ID NO: 548 - protein, 14 aa, Artificial Sequence
  Description of Artificial Sequence: Synthetic peptide
  N-term Ac
  MOD_RES (4)..(4): Alpha-Me R8-octenyl-alanine olefin amino acid connected by an all-carbon crosslinker comprising one double bond
  misc_feature (4)..(11): Crosslink between residues
  MOD_RES (10)..(10): Cyclobutyl-Ala
  MOD_RES (11)..(11): Alpha-Me S5-pentenyl-alanine olefin amino acid connected by an all-carbon crosslinker comprising one double bond
  C-term NH2
LTFAKYWAQAASAA

SEQ ID NO: 549 - protein, 14 aa, Artificial Sequence
  Description of Artificial Sequence: Synthetic peptide
  N-term Ac
  MOD_RES (4)..(4): Alpha-Me R8-octenyl-alanine olefin amino acid connected by an all-carbon crosslinker comprising one double bond
  misc_feature (4)..(11): Crosslink between residues
  MOD_RES (10)..(10): Cyclobutyl-Ala
  MOD_RES (11)..(11): Alpha-Me S5-pentenyl-alanine olefin amino acid connected by an all-carbon crosslinker comprising one double bond
  C-term NH2
LTFAQYWAQAASAA

SEQ ID NO: 550 - protein, 14 aa, Artificial Sequence
  Description of Artificial Sequence: Synthetic peptide
  N-term Ac
  MOD_RES (4)..(4): Alpha-Me R8-octenyl-alanine olefin amino acid connected by an all-carbon crosslinker comprising one double bond
  misc_feature (4)..(11): Crosslink between residues
  MOD_RES (10)..(10): Cyclobutyl-Ala
  MOD_RES (11)..(11): Alpha-Me S5-pentenyl-alanine olefin amino acid connected by an all-carbon crosslinker comprising one double bond
  C-term NH2
LTFAEYWAAAASAA

SEQ ID NO: 551 - protein, 14 aa, Artificial Sequence
  Description of Artificial Sequence: Synthetic peptide
  N-term Ac
  MOD_RES (4)..(4): Alpha-Me R8-octenyl-alanine olefin amino acid connected by an all-carbon crosslinker comprising one double bond
  misc_feature (4)..(11): Crosslink between residues
  MOD_RES (10)..(10): Cyclobutyl-Ala
  MOD_RES (11)..(11): Alpha-Me S5-pentenyl-alanine olefin amino acid connected by an all-carbon crosslinker comprising one double bond
  C-term NH2
LTFAEYWAQAAAAA

SEQ ID NO: 552 - protein, 16 aa, Artificial Sequence
  Description of Artificial Sequence: Synthetic peptide
  N-term Ac
  MOD_RES (4)..(4): Alpha-Me R8-octenyl-alanine olefin amino acid connected by an all-carbon crosslinker comprising one double bond
  misc_feature (4)..(11): Crosslink between residues
  MOD_RES (11)..(11): Alpha-Me S5-pentenyl-alanine olefin amino acid connected by an all-carbon crosslinker comprising one double bond
  C-term OH
LTFAEYWAQLAAAAAA

SEQ ID NO: 553 - protein, 15 aa, Artificial Sequence
  Description of Artificial Sequence: Synthetic peptide
  N-term Ac
  MOD_RES (4)..(4): Alpha-Me R8-octenyl-alanine olefin amino acid connected by an all-carbon crosslinker comprising one double bond
  misc_feature (4)..(11): Crosslink between residues
  MOD_RES (11)..(11): Alpha-Me S5-pentenyl-alanine olefin amino acid connected by an all-carbon crosslinker comprising one double bond
  C-term OH
LTFAEYWAQLAAAAA

SEQ ID NO: 554 - protein, 13 aa, Artificial Sequence
  Description of Artificial Sequence: Synthetic peptide
  N-term Ac
  MOD_RES (4)..(4): Alpha-Me R8-octenyl-alanine olefin amino acid connected by an all-carbon crosslinker comprising one double bond
  misc_feature (4)..(11): Crosslink between residues
  MOD_RES (11)..(11): Alpha-Me S5-pentenyl-alanine olefin amino acid connected by an all-carbon crosslinker comprising one double bond
  C-term OH
LTFAEYWAQLAAA

SEQ ID NO: 555 - protein, 17 aa, Artificial Sequence
  Description of Artificial Sequence: Synthetic peptide
  N-term Ac
  MOD_RES (4)..(4): Alpha-Me R8-octenyl-alanine olefin amino acid connected by an all-carbon crosslinker comprising one double bond
  misc_feature (4)..(11): Crosslink between residues
  MOD_RES (6)..(6): Phe-4bOH2
  MOD_RES (11)..(11): Alpha-Me S5-pentenyl-alanine olefin amino acid connected by an all-carbon crosslinker comprising one double bond
  MOD_RES (17)..(17): D-amino acid
  C-term NH2
LTFAAFWAQLAAAAAAA

SEQ ID NO: 556 - protein, 17 aa, Artificial Sequence
  Description of Artificial Sequence: Synthetic peptide
  N-term Ac
  MOD_RES (4)..(4): Alpha-Me R8-octenyl-alanine olefin amino acid connected by an all-carbon crosslinker comprising one double bond
  misc_feature (4)..(11): Crosslink between residues
  MOD_RES (6)..(6): Phe-4bOH2
  MOD_RES (11)..(11): Alpha-Me S5-pentenyl-alanine olefin amino acid connected by an all-carbon crosslinker comprising one double bond
  MOD_RES (17)..(17): D-amino acid
  C-term NH2
LTFAAFWAALAAAAAAA

SEQ ID NO: 557 - protein, 14 aa, Artificial Sequence
  Description of Artificial Sequence: Synthetic peptide
  N-term Ac
  MOD_RES (4)..(4): Alpha-Me R8-octenyl-alanine olefin amino acid connected by an all-carbon crosslinker comprising one double bond
  misc_feature (4)..(11): Crosslink between residues
  MOD_RES (6)..(6): Phe-4bOH2
  MOD_RES (10)..(10): Cyclobutyl-Ala
  MOD_RES (11)..(11): Alpha-Me S5-pentenyl-alanine olefin amino acid connected by an all-carbon crosslinker comprising one double bond
  C-term NH2
LTFAEFWAQAASAA

SEQ ID NO: 558 - protein, 17 aa, Artificial Sequence
  Description of Artificial Sequence: Synthetic peptide
  N-term Ac
  MOD_RES (4)..(4): Alpha-Me R8-octenyl-alanine olefin amino acid connected by an all-carbon crosslinker comprising one double bond
  misc_feature (4)..(11): Crosslink between residues
  MOD_RES (6)..(6): pY
  MOD_RES (11)..(11): Alpha-Me S5-pentenyl-alanine olefin amino acid connected by an all-carbon crosslinker comprising one double bond
  MOD_RES (17)..(17): D-amino acid
  C-term NH2
LTFAAYWAQLAAAAAAA

SEQ ID NO: 559 - protein, 17 aa, Artificial Sequence
  Description of Artificial Sequence: Synthetic peptide
  N-term Ac
  MOD_RES (4)..(4): Alpha-Me R8-octenyl-alanine olefin amino acid connected by an all-carbon crosslinker comprising one double bond
  misc_feature (4)..(11): Crosslink between residues
  MOD_RES (6)..(6): pY
  MOD_RES (11)..(11): Alpha-Me S5-pentenyl-alanine olefin amino acid connected by an all-carbon crosslinker comprising one double bond
  MOD_RES (17)..(17): D-amino acid
  C-term NH2
LTFAAYWAALAAAAAAA

SEQ ID NO: 560 - protein, 14 aa, Artificial Sequence
  Description of Artificial Sequence: Synthetic peptide
  N-term Ac
  MOD_RES (4)..(4): Alpha-Me R8-octenyl-alanine olefin amino acid connected by an all-carbon crosslinker comprising one double bond
  misc_feature (4)..(11): Crosslink between residues
  MOD_RES (6)..(6): pY
  MOD_RES (10)..(10): Cyclobutyl-Ala
  MOD_RES (11)..(11): Alpha-Me S5-pentenyl-alanine olefin amino acid connected by an all-carbon crosslinker comprising one double bond
  C-term NH2
LTFAEYWAQAASAA

SEQ ID NO: 561 - protein, 17 aa, Artificial Sequence
  Description of Artificial Sequence: Synthetic peptide
  N-term Ac
  MOD_RES (4)..(4): Alpha-Me R6-hexynyl-alanine alkynyl amino acids, crosslink via a dialkyne bond with a second alkynyl amino acid
  misc_feature (4)..(11): Crosslink between residues
  MOD_RES (11)..(11): Alpha-Me S5-pentynyl-alanine alkynyl amino acids, wherein the alkyne forms one half of a dialkyne bond with a second alkynyl amino acid
  MOD_RES (17)..(17): D-amino acid
  C-term NH2
LTFAAYWAQLAAAAAAA

SEQ ID NO: 562 - protein, 14 aa, Artificial Sequence
  Description of Artificial Sequence: Synthetic peptide
  N-term Ac
  MOD_RES (4)..(4): Alpha-Me R6-hexynyl-alanine alkynyl amino acids, crosslink via a dialkyne bond with a second alkynyl amino acid
  misc_feature (4)..(11): Crosslink between residues
  MOD_RES (10)..(10): Cyclobutyl-Ala
  MOD_RES (11)..(11): Alpha-Me S5-pentynyl-alanine alkynyl amino acids, wherein the alkyne forms one half of a dialkyne bond with a second alkynyl amino acid
  C-term NH2
LTFAEYWAQAASAA

SEQ ID NO: 563 - protein, 17 aa, Artificial Sequence
  Description of Artificial Sequence: Synthetic peptide
  N-term Ac
  MOD_RES (4)..(4): Alpha-Me R6-hexynyl-alanine alkynyl amino acids, crosslink via a dialkyne bond with a second alkynyl amino acid
  misc_feature (4)..(11): Crosslink between residues
  MOD_RES (11)..(11): Alpha-Me S5-pentynyl-alanine alkynyl amino acids, wherein the alkyne forms one half of a dialkyne bond with a second alkynyl amino acid
  MOD_RES (17)..(17): D-amino acid
  C-term NH2
LTFAEYWAQLAAAAAAA

SEQ ID NO: 564 - protein, 17 aa, Artificial Sequence
  Description of Artificial Sequence: Synthetic peptide
  N-term Ac
  MOD_RES (4)..(4): Alpha-Me R9-nonynyl-alanine alkynyl amino acid crosslinked via an alkyne metathesis reaction with a second alkynyl amino acid
  misc_feature (4)..(11): Crosslink between residues
  MOD_RES (11)..(11): Alpha-Me S6-hexynyl-alanine alkynyl amino acid crosslinked via an alkyne metathesis reaction with a second alkynyl amino acid
  MOD_RES (17)..(17): D-amino acid
  C-term NH2
LTFAEYWAQLAAAAAAA

SEQ ID NO: 565 - protein, 17 aa, Artificial Sequence
  Description of Artificial Sequence: Synthetic peptide
  N-term Ac
  MOD_RES (4)..(4): Alpha-Me R9-nonynyl-alanine alkynyl amino acid crosslinked via an alkyne metathesis reaction with a second alkynyl amino acid
  misc_feature (4)..(11): Crosslink between residues
  MOD_RES (11)..(11): Alpha-Me S6-hexynyl-alanine alkynyl amino acid crosslinked via an alkyne metathesis reaction with a second alkynyl amino acid
  MOD_RES (17)..(17): D-amino acid
  C-term NH2
LTFAEYWAQLAAAAAAA

SEQ ID NO: 566 - protein, 14 aa, Artificial Sequence
  Description of Artificial Sequence: Synthetic peptide
  N-term Ac
  MOD_RES (4)..(4): Alpha-Me R9-nonynyl-alanine alkynyl amino acid crosslinked via an alkyne metathesis reaction with a second alkynyl amino acid
  misc_feature (4)..(11): Crosslink between residues
  MOD_RES (10)..(10): Cyclobutyl-Ala
  MOD_RES (11)..(11): Alpha-Me S6-hexynyl-alanine alkynyl amino acid crosslinked via an alkyne metathesis reaction with a second alkynyl amino acid
  C-term NH2
LTFAEYWAQAASAA

SEQ ID NO: 567 - protein, 14 aa, Artificial Sequence
  Description of Artificial Sequence: Synthetic peptide
  N-term Ac
  MOD_RES (4)..(4): Alpha-Me R9-nonynyl-alanine alkynyl amino acid crosslinked via an alkyne metathesis reaction with a second alkynyl amino acid
  misc_feature (4)..(11): Crosslink between residues
  MOD_RES (10)..(10): Cyclobutyl-Ala
  MOD_RES (11)..(11): Alpha-Me S6-hexynyl-alanine alkynyl amino acid crosslinked via an alkyne metathesis reaction with a second alkynyl amino acid
  C-term NH2
LTAAEYWAQAASAA

SEQ ID NO: 568 - protein, 15 aa, Artificial Sequence
  Description of Artificial Sequence: Synthetic peptide
  N-term 5-FAM
  MOD_RES (1)..(1): Beta-Ala
  MOD_RES (5)..(5): Alpha-Me R9-nonynyl-alanine alkynyl amino acid crosslinked via an alkyne metathesis reaction with a second alkynyl amino acid
  misc_feature (5)..(12): Crosslink between residues
  MOD_RES (11)..(11): Cyclobutyl-Ala
  MOD_RES (12)..(12): Alpha-Me S6-hexynyl-alanine alkynyl amino acid crosslinked via an alkyne metathesis reaction with a second alkynyl amino acid
  C-term NH2
ALTFAEYWAQAASAA

SEQ ID NO: 569 - protein, 18 aa, Artificial Sequence
  Description of Artificial Sequence: Synthetic peptide
  N-term 5-FAM
  MOD_RES (1)..(1): Beta-Ala
  MOD_RES (5)..(5): Alpha-Me R8-octenyl-alanine olefin amino acid connected by an all-carbon crosslinker comprising one double bond
  misc_feature (5)..(12): Crosslink between residues
  MOD_RES (12)..(12): Alpha-Me S5-pentenyl-alanine olefin amino acid connected by an all-carbon crosslinker comprising one double bond
  MOD_RES (18)..(18): D-amino acid
  C-term NH2
ALTFAEYWAQLAAAAAAA

SEQ ID NO: 570 - protein, 18 aa, Artificial Sequence
  Description of Artificial Sequence: Synthetic peptide
  N-term 5-FAM
  MOD_RES (1)..(1): Beta-Ala
  MOD_RES (5)..(5): Alpha-Me R8-octenyl-alanine olefin amino acid that is not connected by a crosslinker
  MOD_RES (12)..(12): Alpha-Me S5-pentenyl-alanine olefin amino acid that is not connected by a crosslinker
  MOD_RES (18)..(18): D-amino acid
  C-term NH2
ALTFAEYWAQLAAAAAAA

SEQ ID NO: 571 - protein, 18 aa, Artificial Sequence
  Description of Artificial Sequence: Synthetic peptide
  N-term 5-FAM
  MOD_RES (1)..(1): Beta-Ala
  MOD_RES (5)..(5): Alpha-Me R8-octenyl-alanine olefin amino acid connected by an all-carbon crosslinker comprising one double bond
  misc_feature (5)..(12): Crosslink between residues
  MOD_RES (12)..(12): Alpha-Me S5-pentenyl-alanine olefin amino acid connected by an all-carbon crosslinker comprising one double bond
  MOD_RES (18)..(18): D-amino acid
  C-term NH2
ALTAAEYWAQLAAAAAAA

SEQ ID NO: 572 - protein, 18 aa, Artificial Sequence
  Description of Artificial Sequence: Synthetic peptide
  N-term 5-FAM
  MOD_RES (1)..(1): Beta-Ala
  MOD_RES (5)..(5): Alpha-Me R8-octenyl-alanine olefin amino acid connected by an all-carbon crosslinker comprising one double bond
  misc_feature (5)..(12): Crosslink between residues
  MOD_RES (12)..(12): Alpha-Me S5-pentenyl-alanine olefin amino acid connected by an all-carbon crosslinker comprising one double bond
  MOD_RES (18)..(18): D-amino acid
  C-term NH2
ALTFAAYWAQLAAAAAAA

SEQ ID NO: 573 - protein, 18 aa, Artificial Sequence
  Description of Artificial Sequence: Synthetic peptide
  N-term 5-FAM
  MOD_RES (1)..(1): Beta-Ala
  MOD_RES (5)..(5): Alpha-Me R8-octenyl-alanine olefin amino acid connected by an all-carbon crosslinker comprising one double bond
  misc_feature (5)..(12): Crosslink between residues
  MOD_RES (12)..(12): Alpha-Me S5-pentenyl-alanine olefin amino acid connected by an all-carbon crosslinker comprising one double bond
  MOD_RES (18)..(18): D-amino acid
  C-term NH2
AATFAEYWAQLAAAAAAA

SEQ ID NO: 574 - protein, 18 aa, Artificial Sequence
  Description of Artificial Sequence: Synthetic peptide
  N-term 5-FAM
  MOD_RES (1)..(1): Beta-Ala
  MOD_RES (5)..(5): Alpha-Me R8-octenyl-alanine olefin amino acid connected by an all-carbon crosslinker comprising one double bond
  misc_feature (5)..(12): Crosslink between residues
  MOD_RES (12)..(12): Alpha-Me S5-pentenyl-alanine olefin amino acid connected by an all-carbon crosslinker comprising one double bond
  MOD_RES (18)..(18): D-amino acid
  C-term NH2
ALAFAEYWAQLAAAAAAA

SEQ ID NO: 575 - protein, 18 aa, Artificial Sequence
  Description of Artificial Sequence: Synthetic peptide
  N-term 5-FAM
  MOD_RES (1)..(1): Beta-Ala
  MOD_RES (5)..(5): Alpha-Me R8-octenyl-alanine olefin amino acid connected by an all-carbon crosslinker comprising one double bond
  misc_feature (5)..(12): Crosslink between residues
  MOD_RES (12)..(12): Alpha-Me S5-pentenyl-alanine olefin amino acid connected by an all-carbon crosslinker comprising one double bond
  MOD_RES (18)..(18): D-amino acid
  C-term NH2
ALTFAEAWAQLAAAAAAA

SEQ ID NO: 576 - protein, 18 aa, Artificial Sequence
  Description of Artificial Sequence: Synthetic peptide
  N-term 5-FAM
  MOD_RES (1)..(1): Beta-Ala
  MOD_RES (5)..(5): Alpha-Me R8-octenyl-alanine olefin amino acid connected by an all-carbon crosslinker comprising one double bond
  misc_feature (5)..(12): Crosslink between residues
  MOD_RES (12)..(12): Alpha-Me S5-pentenyl-alanine olefin amino acid connected by an all-carbon crosslinker comprising one double bond
  MOD_RES (18)..(18): D-amino acid
  C-term NH2
ALTFAEYAAQLAAAAAAA

SEQ ID NO: 577 - protein, 18 aa, Artificial Sequence
  Description of Artificial Sequence: Synthetic peptide
  N-term 5-FAM
  MOD_RES (1)..(1): Beta-Ala
  MOD_RES (5)..(5): Alpha-Me R8-octenyl-alanine olefin amino acid connected by an all-carbon crosslinker comprising one double bond
  misc_feature (5)..(12): Crosslink between residues
  MOD_RES (12)..(12): Alpha-Me S5-pentenyl-alanine olefin amino acid connected by an all-carbon crosslinker comprising one double bond
  MOD_RES (18)..(18): D-amino acid
  C-term NH2
ALTAAEYAAQLAAAAAAA

SEQ ID NO: 578 - protein, 18 aa, Artificial Sequence
  Description of Artificial Sequence: Synthetic peptide
  N-term 5-FAM
  MOD_RES (1)..(1): Beta-Ala
  MOD_RES (5)..(5): Alpha-Me R8-octenyl-alanine olefin amino acid connected by an all-carbon crosslinker comprising one double bond
  misc_feature (5)..(12): Crosslink between residues
  MOD_RES (12)..(12): Alpha-Me S5-pentenyl-alanine olefin amino acid connected by an all-carbon crosslinker comprising one double bond
  MOD_RES (18)..(18): D-amino acid
  C-term NH2
ALTFAEYWAALAAAAAAA

SEQ ID NO: 579 - protein, 18 aa, Artificial Sequence
  Description of Artificial Sequence: Synthetic peptide
  N-term 5-FAM
  MOD_RES (1)..(1): Beta-Ala
  MOD_RES (5)..(5): Alpha-Me R8-octenyl-alanine olefin amino acid connected by an all-carbon crosslinker comprising one double bond
  misc_feature (5)..(12): Crosslink between residues
  MOD_RES (12)..(12): Alpha-Me S5-pentenyl-alanine olefin amino acid connected by an all-carbon crosslinker comprising one double bond
  MOD_RES (18)..(18): D-amino acid
  C-term NH2
ALTFAEYWAQAAAAAAAA

SEQ ID NO: 580 - protein, 15 aa, Artificial Sequence
  Description of Artificial Sequence: Synthetic peptide
  N-term 5-FAM
  MOD_RES (1)..(1): Beta-Ala
  MOD_RES (5)..(5): Alpha-Me R8-octenyl-alanine olefin amino acid that is not connected by a crosslinker
  MOD_RES (11)..(11): Cyclobutyl-Ala
  MOD_RES (12)..(12): Alpha-Me S5-pentenyl-alanine olefin amino acid that is not connected by a crosslinker
  C-term NH2
ALTFAEYWAQAASAA

SEQ ID NO: 581 - protein, 15 aa, Artificial Sequence
  Description of Artificial Sequence: Synthetic peptide
  N-term 5-FAM
  MOD_RES (1)..(1): Beta-Ala
  MOD_RES (5)..(5): Alpha-Me R8-octenyl-alanine olefin amino acid connected by an all-carbon crosslinker comprising one double bond
  misc_feature (5)..(12): Crosslink between residues
  MOD_RES (11)..(11): Cyclobutyl-Ala
  MOD_RES (12)..(12): Alpha-Me S5-pentenyl-alanine olefin amino acid connected by an all-carbon crosslinker comprising one double bond
  C-term NH2
ALTAAEYWAQAASAA

SEQ ID NO: 582 - protein, 15 aa, Artificial Sequence
  Description of Artificial Sequence: Synthetic peptide
  N-term 5-FAM
  MOD_RES (1)..(1): Beta-Ala
  MOD_RES (5)..(5): Alpha-Me R8-octenyl-alanine olefin amino acid connected by an all-carbon crosslinker comprising one double bond
  misc_feature (5)..(12): Crosslink between residues
  MOD_RES (11)..(11): Cyclobutyl-Ala
  MOD_RES (12)..(12): Alpha-Me S5-pentenyl-alanine olefin amino acid connected by an all-carbon crosslinker comprising one double bond
  C-term NH2
ALTFAEYAAQAASAA

SEQ ID NO: 583 - protein, 15 aa, Artificial Sequence
  Description of Artificial Sequence: Synthetic peptide
  N-term 5-FAM
  MOD_RES (1)..(1): Beta-Ala
  MOD_RES (5)..(5): Alpha-Me R8-octenyl-alanine olefin amino acid connected by an all-carbon crosslinker comprising one double bond
  misc_feature (5)..(12): Crosslink between residues
  MOD_RES (11)..(11): Cyclobutyl-Ala
  MOD_RES (12)..(12): Alpha-Me S5-pentenyl-alanine olefin amino acid connected by an all-carbon crosslinker comprising one double bond
  C-term NH2
ALTAAEYAAQAASAA

SEQ ID NO: 584 - protein, 17 aa, Artificial Sequence
  Description of Artificial Sequence: Synthetic peptide
  N-term 5-FAM
  MOD_RES (1)..(1): Beta-Ala
  MOD_RES (8)..(8): Alpha-Me R8-octenyl-alanine olefin amino acid connected by an all-carbon crosslinker comprising one double bond
  misc_feature (8)..(15): Crosslink between residues
  MOD_RES (15)..(15): Alpha-Me S5-pentenyl-alanine olefin amino acid connected by an all-carbon crosslinker comprising one double bond
  C-term NH2
AQSQQTFANLWRLLAQN

SEQ ID NO: 585 - protein, 15 aa, Artificial Sequence
  Description of Artificial Sequence: Synthetic peptide
  N-term 5-TAMRA
  MOD_RES (1)..(1): Beta-Ala
  MOD_RES (5)..(5): Alpha-Me R8-octenyl-alanine olefin amino acid connected by an all-carbon crosslinker comprising one double bond
  misc_feature (5)..(12): Crosslink between residues
  MOD_RES (11)..(11): Cyclobutyl-Ala
  MOD_RES (12)..(12): Alpha-Me S5-pentenyl-alanine olefin amino acid connected by an all-carbon crosslinker comprising one double bond
  C-term NH2
ALTFAEYWAQAASAA

SEQ ID NO: 586 - protein, 15 aa, Artificial Sequence
  Description of Artificial Sequence: Synthetic peptide
  N-term 5-TAMRA
  MOD_RES (1)..(1): Beta-Ala
  MOD_RES (5)..(5): Alpha-Me R8-octenyl-alanine olefin amino acid connected by an all-carbon crosslinker comprising one double bond
  misc_feature (5)..(12): Crosslink between residues
  MOD_RES (11)..(11): Cyclobutyl-Ala
  MOD_RES (12)..(12): Alpha-Me S5-pentenyl-alanine olefin amino acid connected by an all-carbon crosslinker comprising one double bond
  C-term NH2
ALTAAEYWAQAASAA

SEQ ID NO: 587 - protein, 15 aa, Artificial Sequence
  Description of Artificial Sequence: Synthetic peptide
  N-term 5-TAMRA
  MOD_RES (1)..(1): Beta-Ala
  MOD_RES (5)..(5): Alpha-Me R8-octenyl-alanine olefin amino acid connected by an all-carbon crosslinker comprising one double bond
  misc_feature (5)..(12): Crosslink between residues
  MOD_RES (11)..(11): Cyclobutyl-Ala
  MOD_RES (12)..(12): Alpha-Me S5-pentenyl-alanine olefin amino acid connected by an all-carbon crosslinker comprising one double bond
  C-term NH2
ALTFAEYAAQAASAA

SEQ ID NO: 588 - protein, 15 aa, Artificial Sequence
  Description of Artificial Sequence: Synthetic peptide
  N-term 5-TAMRA
  MOD_RES (1)..(1): Beta-Ala
  MOD_RES (5)..(5): Alpha-Me R8-octenyl-alanine olefin amino acid connected by an all-carbon crosslinker comprising one double bond
  misc_feature (5)..(12): Crosslink between residues
  MOD_RES (11)..(11): Cyclobutyl-Ala
  MOD_RES (12)..(12): Alpha-Me S5-pentenyl-alanine olefin amino acid connected by an all-carbon crosslinker comprising one double bond
  C-term NH2
ALTAAEYAAQAASAA

SEQ ID NO: 589 - protein, 15 aa, Artificial Sequence
  Description of Artificial Sequence: Synthetic peptide
  N-term 5-TAMRA
  MOD_RES (1)..(1): Beta-Ala
  MOD_RES (5)..(5): Alpha-Me R8-octenyl-alanine olefin amino acid that is not connected by a crosslinker
  MOD_RES (11)..(11): Cyclobutyl-Ala
  MOD_RES (12)..(12): Alpha-Me S5-pentenyl-alanine olefin amino acid that is not connected by a crosslinker
  C-term NH2
ALTFAEYWAQAASAA

SEQ ID NO: 590 - protein, 18 aa, Artificial Sequence
  Description of Artificial Sequence: Synthetic peptide
  N-term 5-TAMRA
  MOD_RES (1)..(1): Beta-Ala
  MOD_RES (5)..(5): Alpha-Me R8-octenyl-alanine olefin amino acid connected by an all-carbon crosslinker comprising one double bond
  misc_feature (5)..(12): Crosslink between residues
  MOD_RES (12)..(12): Alpha-Me S5-pentenyl-alanine olefin amino acid connected by an all-carbon crosslinker comprising one double bond
  MOD_RES (18)..(18): D-amino acid
  C-term NH2
ALTFAEYWAQLAAAAAAA

SEQ ID NO: 591 - protein, 18 aa, Artificial Sequence
  Description of Artificial Sequence: Synthetic peptide
  N-term 5-TAMRA
  MOD_RES (1)..(1): Beta-Ala
  MOD_RES (5)..(5): Alpha-Me R8-octenyl-alanine olefin amino acid connected by an all-carbon crosslinker comprising one double bond
  misc_feature (5)..(12): Crosslink between residues
  MOD_RES (12)..(12): Alpha-Me S5-pentenyl-alanine olefin amino acid connected by an all-carbon crosslinker comprising one double bond
  MOD_RES (18)..(18): D-amino acid
  C-term NH2
ALTAAEYWAQLAAAAAAA

SEQ ID NO: 592 - protein, 18 aa, Artificial Sequence
  Description of Artificial Sequence: Synthetic peptide
  N-term 5-TAMRA
  MOD_RES (1)..(1): Beta-Ala
  MOD_RES (5)..(5): Alpha-Me R8-octenyl-alanine olefin amino acid that is not connected by a crosslinker
  MOD_RES (12)..(12): Alpha-Me S5-pentenyl-alanine olefin amino acid that is not connected by a crosslinker
  MOD_RES (18)..(18): D-amino acid
  C-term NH2
ALTFAEYWAQLAAAAAAA

SEQ ID NO: 593 - protein, 14 aa, Artificial Sequence
  Description of Artificial Sequence: Synthetic peptide
  N-term Ac
  MOD_RES (4)..(4): Alpha-Me R8-octenyl-alanine olefin amino acid connected by an all-carbon crosslinker comprising one double bond
  misc_feature (4)..(11): Crosslink between residues
  MOD_RES (8)..(8): Cou7
  MOD_RES (10)..(10): Cyclobutyl-Ala
  MOD_RES (11)..(11): Alpha-Me S5-pentenyl-alanine olefin amino acid connected by an all-carbon crosslinker comprising one double bond
  C-term OH
LTFAEYWXQAASAA

SEQ ID NO: 594 - protein, 12 aa, Artificial Sequence
  Description of Artificial Sequence: Synthetic peptide
  N-term Ac
  MOD_RES (4)..(4): Alpha-Me R8-octenyl-alanine olefin amino acid connected by an all-carbon crosslinker comprising one double bond
  misc_feature (4)..(11): Crosslink between residues
  MOD_RES (8)..(8): Cou7
  MOD_RES (10)..(10): Cyclobutyl-Ala
  MOD_RES (11)..(11): Alpha-Me S5-pentenyl-alanine olefin amino acid connected by an all-carbon crosslinker comprising one double bond
  C-term OH
LTFAEYWXQAAS

SEQ ID NO: 595 - protein, 14 aa, Artificial Sequence
  Description of Artificial Sequence: Synthetic peptide
  N-term Ac
  MOD_RES (4)..(4): Alpha-Me R8-octenyl-alanine olefin amino acid connected by an all-carbon crosslinker comprising one double bond
  misc_feature (4)..(11): Crosslink between residues
  MOD_RES (8)..(8): Cou7
  MOD_RES (10)..(10): Cyclobutyl-Ala
  MOD_RES (11)..(11): Alpha-Me S5-pentenyl-alanine olefin amino acid connected by an all-carbon crosslinker comprising one double bond
  C-term NH2
LTAAEYWXQAASAA

SEQ ID NO: 596 - protein, 14 aa, Artificial Sequence
  Description of Artificial Sequence: Synthetic peptide
  N-term Ac
  MOD_RES (4)..(4): Alpha-Me R8-octenyl-alanine olefin amino acid connected by an all-carbon crosslinker comprising one double bond
  misc_feature (4)..(11): Crosslink between residues
  MOD_RES (8)..(8): Cou7
  MOD_RES (10)..(10): Cyclobutyl-Ala
  MOD_RES (11)..(11): Alpha-Me S5-pentenyl-alanine olefin amino acid connected by an all-carbon crosslinker comprising one double bond
  C-term NH2
LTFAEYAXQAASAA

SEQ ID NO: 597 - protein, 14 aa, Artificial Sequence
  Description of Artificial Sequence: Synthetic peptide
  N-term Ac
  MOD_RES (4)..(4): Alpha-Me R8-octenyl-alanine olefin amino acid connected by an all-carbon crosslinker comprising one double bond
  misc_feature (4)..(11): Crosslink between residues
  MOD_RES (8)..(8): Cou7
  MOD_RES (10)..(10): Cyclobutyl-Ala
  MOD_RES (11)..(11): Alpha-Me S5-pentenyl-alanine olefin amino acid connected by an all-carbon crosslinker comprising one double bond
  C-term NH2
LTAAEYAXQAASAA

SEQ ID NO: 598 - protein, 14 aa, Artificial Sequence
  Description of Artificial Sequence: Synthetic peptide
  N-term Ac
  MOD_RES (4)..(4): Alpha-Me R8-octenyl-alanine olefin amino acid that is not connected by a crosslinker
  MOD_RES (8)..(8): Cou7
  MOD_RES (10)..(10): Cyclobutyl-Ala
  MOD_RES (11)..(11): Alpha-Me S5-pentenyl-alanine olefin amino acid that is not connected by a crosslinker
  C-term NH2
LTFAEYWXQAASAA

SEQ ID NO: 599 - protein, 17 aa, Artificial Sequence
  Description of Artificial Sequence: Synthetic peptide
  N-term Ac
  MOD_RES (4)..(4): Alpha-Me R8-octenyl-alanine olefin amino acid connected by an all-carbon crosslinker comprising one double bond
  misc_feature (4)..(11): Crosslink between residues
  MOD_RES (8)..(8): Cou7
  MOD_RES (11)..(11): Alpha-Me S5-pentenyl-alanine olefin amino acid connected by an all-carbon crosslinker comprising one double bond
  MOD_RES (17)..(17): D-amino acid
  C-term NH2
LTFAEYWXQLAAAAAAA

SEQ ID NO: 600 - protein, 17 aa, Artificial Sequence
  Description of Artificial Sequence: Synthetic peptide
  N-term Ac
  MOD_RES (4)..(4): Alpha-Me R8-octenyl-alanine olefin amino acid that is not connected by a crosslinker
  MOD_RES (8)..(8): Cou7
  MOD_RES (11)..(11): Alpha-Me S5-pentenyl-alanine olefin amino acid that is not connected by a crosslinker
  MOD_RES (17)..(17): D-amino acid
  C-term NH2
LTFAEYWXQLAAAAAAA

SEQ ID NO: 601 - protein, 16 aa, Artificial Sequence
  Description of Artificial Sequence: Synthetic peptide
  N-term Ac
  MOD_RES (4)..(4): Alpha-Me R8-octenyl-alanine olefin amino acid connected by an all-carbon crosslinker comprising one double bond
  misc_feature (4)..(11): Crosslink between residues
  MOD_RES (8)..(8): Cou7
  MOD_RES (11)..(11): Alpha-Me S5-pentenyl-alanine olefin amino acid connected by an all-carbon crosslinker comprising one double bond
  C-term OH
LTFAEYWXQLAAAAAA

SEQ ID NO: 602 - protein, 15 aa, Artificial Sequence
  Description of Artificial Sequence: Synthetic peptide
  N-term Ac
  MOD_RES (4)..(4): Alpha-Me R8-octenyl-alanine olefin amino acid connected by an all-carbon crosslinker comprising one double bond
  misc_feature (4)..(11): Crosslink between residues
  MOD_RES (8)..(8): Cou7
  MOD_RES (11)..(11): Alpha-Me S5-pentenyl-alanine olefin amino acid connected by an all-carbon crosslinker comprising one double bond
  C-term OH
LTFAEYWXQLAAAAA

SEQ ID NO: 603 - protein, 14 aa, Artificial Sequence
  Description of Artificial Sequence: Synthetic peptide
  N-term Ac
  MOD_RES (4)..(4): Alpha-Me R8-octenyl-alanine olefin amino acid connected by an all-carbon crosslinker comprising one double bond
  misc_feature (4)..(11): Crosslink between residues
  MOD_RES (8)..(8): Cou7
  MOD_RES (11)..(11): Alpha-Me S5-pentenyl-alanine olefin amino acid connected by an all-carbon crosslinker comprising one double bond
  C-term OH
LTFAEYWXQLAAAA

SEQ ID NO: 604 - protein, 13 aa, Artificial Sequence
  Description of Artificial Sequence: Synthetic peptide
  N-term Ac
  MOD_RES (4)..(4): Alpha-Me R8-octenyl-alanine olefin amino acid connected by an all-carbon crosslinker comprising one double bond
  misc_feature (4)..(11): Crosslink between residues
  MOD_RES (8)..(8): Cou7
  MOD_RES (11)..(11): Alpha-Me S5-pentenyl-alanine olefin amino acid connected by an all-carbon crosslinker comprising one double bond
  C-term OH
LTFAEYWXQLAAA

SEQ ID NO: 605 - protein, 12 aa, Artificial Sequence
  Description of Artificial Sequence: Synthetic peptide
  N-term Ac
  MOD_RES (4)..(4): Alpha-Me R8-octenyl-alanine olefin amino acid connected by an all-carbon crosslinker comprising one double bond
  misc_feature (4)..(11): Crosslink between residues
  MOD_RES (8)..(8): Cou7
  MOD_RES (11)..(11): Alpha-Me S5-pentenyl-alanine olefin amino acid connected by an all-carbon crosslinker comprising one double bond
  C-term OH
LTFAEYWXQLAA

SEQ ID NO: 606 - protein, 17 aa, Artificial Sequence
  Description of Artificial Sequence: Synthetic peptide
  N-term Ac
  MOD_RES (4)..(4): Alpha-Me R8-octenyl-alanine olefin amino acid connected by an all-carbon crosslinker comprising one double bond
  misc_feature (4)..(11): Crosslink between residues
  MOD_RES (11)..(11): Alpha-Me S5-pentenyl-alanine olefin amino acid connected by an all-carbon crosslinker comprising one double bond
  MOD_RES (17)..(17): D-amino acid
  C-term NH2
LTFAEYWAQLAAAAASA

SEQ ID NO: 607 - protein, 17 aa, Artificial Sequence
  Description of Artificial Sequence: Synthetic peptide
  N-term Ac
  MOD_RES (4)..(4): Alpha-Me R8-octenyl-alanine olefin amino acid connected by an all-carbon crosslinker comprising one double bond
  misc_feature (4)..(11): Crosslink between residues
  MOD_RES (11)..(11): Alpha-Me S5-pentenyl-alanine olefin amino acid connected by an all-carbon crosslinker comprising one double bond
  MOD_RES (17)..(17): D-amino acid
  C-term NH2
LTFAAYWAALAAAAAAA

SEQ ID NO: 608 - protein, 18 aa, Artificial Sequence
  Description of Artificial Sequence: Synthetic peptide
  N-term Biotin
  MOD_RES (1)..(1): Beta-Ala
  MOD_RES (5)..(5): Alpha-Me R8-octenyl-alanine olefin amino acid connected by an all-carbon crosslinker comprising one double bond
  misc_feature (5)..(12): Crosslink between residues
  MOD_RES (12)..(12): Alpha-Me S5-pentenyl-alanine olefin amino acid connected by an all-carbon crosslinker comprising one double bond
  MOD_RES (18)..(18): D-amino acid
  C-term NH2
ALTFAEYWAQLAAAAAAA

SEQ ID NO: 609 - protein, 12 aa, Artificial Sequence
  Description of Artificial Sequence: Synthetic peptide
  N-term Ac
  MOD_RES (4)..(4): Alpha-Me R8-octenyl-alanine olefin amino acid connected by an all-carbon crosslinker comprising one double bond
  misc_feature (4)..(11): Crosslink between residues
  MOD_RES (11)..(11): Alpha-Me S5-pentenyl-alanine olefin amino acid connected by an all-carbon crosslinker comprising one double bond
  C-term NH2
LTFAHAWAQLAS

SEQ ID NO: 610 - protein, 13 aa, Artificial Sequence
  Description of Artificial Sequence: Synthetic peptide
  N-term Ac
  MOD_RES (4)..(4): Alpha-Me R8-octenyl-alanine olefin amino acid connected by an all-carbon crosslinker comprising one double bond
  misc_feature (4)..(11): Crosslink between residues
  MOD_RES (10)..(10): Cyclobutyl-Ala
  MOD_RES (11)..(11): Alpha-Me S5-pentenyl-alanine olefin amino acid connected by an all-carbon crosslinker comprising one double bond
  C-term NH2
LTFAEYWAQAASA

SEQ ID NO: 611 - protein, 14 aa, Artificial Sequence
  Description of Artificial Sequence: Synthetic peptide
  N-term Ac
  MOD_RES (4)..(4): Alpha-Me R8-octenyl-alanine olefin amino acid connected by an all-carbon crosslinker comprising one double bond
  misc_feature (4)..(11): Crosslink between residues
  MOD_RES (10)..(10): Cyclobutyl-Ala
  MOD_RES (11)..(11): Alpha-Me S5-pentenyl-alanine olefin amino acid connected by an all-carbon crosslinker comprising one double bond
  C-term NH2
LTFAHYWAQAASAA

SEQ ID NO: 612 - protein, 14 aa, Artificial Sequence
  Description of Artificial Sequence: Synthetic peptide
  N-term Ac
  MOD_RES (4)..(4): Alpha-Me R8-octenyl-alanine olefin amino acid connected by an all-carbon crosslinker comprising one double bond
  misc_feature (4)..(11): Crosslink between residues
  MOD_RES (10)..(10): Cyclobutyl-Ala
  MOD_RES (11)..(11): Alpha-Me S5-pentenyl-alanine olefin amino acid connected by an all-carbon crosslinker comprising one double bond
  C-term NH2
LTFASYWAQAASAA

SEQ ID NO: 613 - protein, 14 aa, Artificial Sequence
  Description of Artificial Sequence: Synthetic peptide
  N-term Ac
  MOD_RES (4)..(4): Alpha-Me R8-octenyl-alanine olefin amino acid connected by an all-carbon crosslinker comprising one double bond
  misc_feature (4)..(11): Crosslink between residues
  MOD_RES (10)..(10): Cyclobutyl-Ala
  MOD_RES (11)..(11): Alpha-Me S5-pentenyl-alanine olefin amino acid connected by an all-carbon crosslinker comprising one double bond
  C-term NH2
LTFARYWAQAASAA

SEQ ID NO: 614 - protein, 14 aa, Artificial Sequence
  Description of Artificial Sequence: Synthetic peptide
  N-term Ac
  MOD_RES (4)..(4): Alpha-Me R8-octenyl-alanine olefin amino acid connected by an all-carbon crosslinker comprising one double bond
  misc_feature (4)..(11): Crosslink between residues
  MOD_RES (10)..(10): Cyclobutyl-Ala
  MOD_RES (11)..(11): Alpha-Me S5-pentenyl-alanine olefin amino acid connected by an all-carbon crosslinker comprising one double bond
  C-term NH2
LTFAKYWAQAASAA

SEQ ID NO: 615 - protein, 14 aa, Artificial Sequence
  Description of Artificial Sequence: Synthetic peptide
  N-term Ac
  MOD_RES (4)..(4): Alpha-Me R8-octenyl-alanine olefin amino acid connected by an all-carbon crosslinker comprising one double bond
  misc_feature (4)..(11): Crosslink between residues
  MOD_RES (10)..(10): Cyclobutyl-Ala
  MOD_RES (11)..(11): Alpha-Me S5-pentenyl-alanine olefin amino acid connected by an all-carbon crosslinker comprising one double bond
  C-term NH2
LTFAEYWAQAAAAA

SEQ ID NO: 616 - protein, 19 aa, Artificial Sequence
  Description of Artificial Sequence: Synthetic peptide
  N-term Ac
  MOD_RES (4)..(4): Alpha-Me R8-octenyl-alanine olefin amino acid connected by an all-carbon crosslinker comprising one double bond
  misc_feature (4)..(11): Crosslink between residues
  MOD_RES (11)..(11): Alpha-Me S5-pentenyl-alanine olefin amino acid connected by an all-carbon crosslinker comprising one double bond
  MOD_RES (17)..(17): D-amino acid
  MOD_RES (18)..(18): Beta-Ala
  C-term NH2
LTFAEYWAQLAAAAAAAAC

SEQ ID NO: 617 - protein, 19 aa, Artificial Sequence
  Description of Artificial Sequence: Synthetic peptide
  N-term Ac
  MOD_RES (4)..(4): Alpha-Me R8-octenyl-alanine olefin amino acid connected by an all-carbon crosslinker comprising one double bond
  misc_feature (4)..(11): Crosslink between residues
  MOD_RES (11)..(11): Alpha-Me S5-pentenyl-alanine olefin amino acid connected by an all-carbon crosslinker comprising one double bond
  MOD_RES (17)..(18): D-amino acid
  MOD_RES (19)..(19): Peg4C
  C-term NH2
LTFAEYWAQLAAAAAAADC

SEQ ID NO: 618 - protein, 17 aa, Artificial Sequence
  Description of Artificial Sequence: Synthetic peptide
  N-term Ac
  MOD_RES (4)..(4): Alpha-Me R8-octenyl-alanine olefin amino acid connected by an all-carbon crosslinker comprising one double bond
  misc_feature (4)..(11): Crosslink between residues
  MOD_RES (11)..(11): Alpha-Me S5-pentenyl-alanine olefin amino acid connected by an all-carbon crosslinker comprising one double bond
  MOD_RES (17)..(17): D-amino acid
  C-term NH2
LTAAAYWAALAAAAAAA

SEQ ID NO: 619 - protein, 17 aa, Artificial Sequence
  Description of Artificial Sequence: Synthetic peptide
  N-term Ac
  MOD_RES (4)..(4): Alpha-Me R8-octenyl-alanine olefin amino acid connected by an all-carbon crosslinker comprising one double bond
  misc_feature (4)..(11): Crosslink between residues
  MOD_RES (11)..(11): Alpha-Me S5-pentenyl-alanine olefin amino acid connected by an all-carbon crosslinker comprising one double bond
  MOD_RES (17)..(17): D-amino acid
  C-term NH2
LTFAAYAAALAAAAAAA

SEQ ID NO: 620 - protein, 18 aa, Artificial Sequence
  Description of Artificial Sequence: Synthetic peptide
  N-term 5-FAM
  MOD_RES (1)..(1): Beta-Ala
  MOD_RES (5)..(5): Alpha-Me R8-octenyl-alanine olefin amino acid connected by an all-carbon crosslinker comprising one double bond
  misc_feature (5)..(12): Crosslink between residues
  MOD_RES (12)..(12): Alpha-Me S5-pentenyl-alanine olefin amino acid connected by an all-carbon crosslinker comprising one double bond
  MOD_RES (18)..(18): D-amino acid
  C-term NH2
ALTFAAYWAALAAAAAAA

SEQ ID NO: 621 - protein, 17 aa, Artificial Sequence
  Description of Artificial Sequence: Synthetic peptide
  N-term Ac
  MOD_RES (4)..(4): Alpha-Me R8-octenyl-alanine olefin amino acid connected by an all-carbon crosslinker comprising one double bond
  misc_feature (4)..(11): Crosslink between residues
  MOD_RES (11)..(11): Alpha-Me S5-pentenyl-alanine olefin amino acid connected by an all-carbon crosslinker comprising one double bond
  MOD_RES (17)..(17): D-amino acid
  C-term NH2
LTAAAYWAQLAAAAAAA

SEQ ID NO: 622 - protein, 17 aa, Artificial Sequence
  Description of Artificial Sequence: Synthetic peptide
  N-term Ac
  MOD_RES (4)..(4): Alpha-Me R8-octenyl-alanine olefin amino acid connected by an all-carbon crosslinker comprising one double bond
  misc_feature (4)..(11): Crosslink between residues
  MOD_RES (11)..(11): Alpha-Me S5-pentenyl-alanine olefin amino acid connected by an all-carbon crosslinker comprising one double bond
  MOD_RES (17)..(17): D-amino acid
  C-term NH2
LTFAAYAAQLAAAAAAA

SEQ ID NO: 623 - protein, 17 aa, Artificial Sequence
  Description of Artificial Sequence: Synthetic peptide
  N-term Ac
  MOD_RES (4)..(4): Alpha-Me R6-hexynyl-alanine alkynyl amino acids, crosslink via a dialkyne bond with a second alkynyl amino acid
  misc_feature (4)..(11): Crosslink between residues
  MOD_RES (11)..(11): Alpha-Me S5-pentynyl-alanine alkynyl amino acids, wherein the alkyne forms one half of a dialkyne bond with a second alkynyl amino acid
  MOD_RES (17)..(17): D-amino acid
  C-term NH2
LTFAAYWAALAAAAAAA

SEQ ID NO: 624 - protein, 18 aa, Artificial Sequence
  Description of Artificial Sequence: Synthetic peptide
  N-term FITC
  MOD_RES (1)..(1): Beta-Ala
  MOD_RES (5)..(5): Alpha-Me R8-octenyl-alanine olefin amino acid connected by an all-carbon crosslinker comprising one double bond
  misc_feature (5)..(12): Crosslink between residues
  MOD_RES (12)..(12): Alpha-Me S5-pentenyl-alanine olefin amino acid connected by an all-carbon crosslinker comprising one double bond
  MOD_RES (18)..(18): D-amino acid
  C-term NH2
ALTFAEYWAQLAAAAAAA

SEQ ID NO: 625 - protein, 15 aa, Artificial Sequence
  Description of Artificial Sequence: Synthetic peptide
  N-term FITC
  MOD_RES (1)..(1): Beta-Ala
  MOD_RES (5)..(5): Alpha-Me R8-octenyl-alanine olefin amino acid connected by an all-carbon crosslinker comprising one double bond
  misc_feature (5)..(12): Crosslink between residues
  MOD_RES (11)..(11): Cyclobutyl-Ala
  MOD_RES (12)..(12): Alpha-Me S5-pentenyl-alanine olefin amino acid connected by an all-carbon crosslinker comprising one double bond
  C-term NH2
ALTFAEYWAQAASAA

SEQ ID NO: 626 - protein, 17 aa, Artificial Sequence
  Description of Artificial Sequence: Synthetic peptide
  N-term Ac
  MOD_RES (4)..(4): Alpha-Me R8-octenyl-alanine olefin amino acid connected by an all-carbon crosslinker comprising one double bond
  misc_feature (4)..(11): Crosslink between residues
  MOD_RES (11)..(11): Alpha-Me S5-pentenyl-alanine olefin amino acid connected by an all-carbon crosslinker comprising one double bond
  MOD_RES (17)..(17): D-amino acid
  C-term NH2
LTFAEYWAQLAEAAAAA

SEQ ID NO: 627 - protein, 17 aa, Artificial Sequence
  Description of Artificial Sequence: Synthetic peptide
  N-term Ac
  MOD_RES (4)..(4): Alpha-Me R8-octenyl-alanine olefin amino acid connected by an all-carbon crosslinker comprising one double bond
  misc_feature (4)..(11): Crosslink between residues
  MOD_RES (11)..(11): Alpha-Me S5-pentenyl-alanine olefin amino acid connected by an all-carbon crosslinker comprising one double bond
  MOD_RES (17)..(17): D-amino acid
  C-term NH2
LTFAAYWAQLAEAAAAA

SEQ ID NO: 628 - protein, 19 aa, Artificial Sequence
  Description of Artificial Sequence: Synthetic peptide
  N-term Ac
  MOD_RES (4)..(4): Alpha-Me R8-octenyl-alanine olefin amino acid connected by an all-carbon crosslinker comprising one double bond
  misc_feature (4)..(11): Crosslink between residues
  MOD_RES (11)..(11): Alpha-Me S5-pentenyl-alanine olefin amino acid connected by an all-carbon crosslinker comprising one double bond
  MOD_RES (17)..(17): D-amino acid
  MOD_RES (18)..(18): Beta-Ala
  MOD_RES (19)..(19): Lys-bio
  C-term NH2
LTFAEYWAQLAAAAAAAAK

SEQ ID NO: 629 - protein, 17 aa, Artificial Sequence
  Description of Artificial Sequence: Synthetic peptide
  N-term Ac
  MOD_RES (4)..(4): Alpha-Me R8-octenyl-alanine olefin amino acid connected by an all-carbon crosslinker comprising one double bond
  misc_feature (4)..(11): Crosslink between residues
  MOD_RES (11)..(11): Alpha-Me S5-pentenyl-alanine olefin amino acid connected by an all-carbon crosslinker comprising one double bond
  MOD_RES (17)..(17): D-amino acid
  C-term NH2
LTFAAYWAALAAAAAAA

SEQ ID NO: 630 - protein, 17 aa, Artificial Sequence
  Description of Artificial Sequence: Synthetic peptide
  N-term Ac
  MOD_RES (4)..(4): Alpha-Me R8-octenyl-alanine olefin amino acid connected by an all-carbon crosslinker comprising one double bond
  misc_feature (4)..(11): Crosslink between residues
  MOD_RES (11)..(11): Alpha-Me S5-pentenyl-alanine olefin amino acid connected by an all-carbon crosslinker comprising one double bond
  MOD_RES (17)..(17): D-amino acid
  C-term NH2
LTFAAYAAALAAAAAAA

SEQ ID NO: 631 - protein, 17 aa, Artificial Sequence
  Description of Artificial Sequence: Synthetic peptide
  N-term Ac
  MOD_RES (4)..(4): Alpha-Me R8-octenyl-alanine olefin amino acid connected by an all-carbon crosslinker comprising one double bond
  misc_feature (4)..(11): Crosslink between residues
  MOD_RES (11)..(11): Alpha-Me S5-pentenyl-alanine olefin amino acid connected by an all-carbon crosslinker comprising one double bond
  MOD_RES (17)..(17): D-amino acid
  C-term NH2
LTFAAYAAQLAAAAAAA

SEQ ID NO: 632 - protein, 17 aa, Artificial Sequence
  Description of Artificial Sequence: Synthetic peptide
  N-term Ac
  MOD_RES (4)..(4): Alpha-Me R8-octenyl-alanine olefin amino acid connected by an all-carbon crosslinker comprising one double bond
  misc_feature (4)..(11): Crosslink between residues
  MOD_RES (11)..(11): Alpha-Me S5-pentenyl-alanine olefin amino acid connected by an all-carbon crosslinker comprising one double bond
  MOD_RES (17)..(17): D-amino acid
  C-term NH2
LTFAEYWAQLAEAAAAA

SEQ ID NO: 633 - protein, 17 aa, Artificial Sequence
  Description of Artificial Sequence: Synthetic peptide
  N-term Ac
  MOD_RES (4)..(4): Alpha-Me R8-octenyl-alanine olefin amino acid connected by an all-carbon crosslinker comprising one double bond
  misc_feature (4)..(11): Crosslink between residues
  MOD_RES (11)..(11): Alpha-Me S5-pentenyl-alanine olefin amino acid connected by an all-carbon crosslinker comprising one double bond
  MOD_RES (17)..(17): D-amino acid
  C-term NH2
LTFAAYWAQLAEAAAAA

SEQ ID NO: 634 - protein, 17 aa, Artificial Sequence
  Description of Artificial Sequence: Synthetic peptide
  N-term Ac
  MOD_RES (4)..(4): Alpha-Me R8-octenyl-alanine olefin amino acid connected by an all-carbon crosslinker comprising one double bond
  misc_feature (4)..(11): Crosslink between residues
  MOD_RES (10)..(10): Cyclobutyl-Ala
  MOD_RES (11)..(11): Alpha-Me S5-pentenyl-alanine olefin amino acid connected by an all-carbon crosslinker comprising one double bond
  MOD_RES (17)..(17): D-amino acid
  C-term NH2
LTFAEYWAQAASAAAAA

SEQ ID NO: 635 - protein, 17 aa, Artificial Sequence
  Description of Artificial Sequence: Synthetic peptide
  N-term Ac
  MOD_RES (4)..(4): Alpha-Me R8-octenyl-alanine olefin amino acid connected by an all-carbon crosslinker comprising one double bond
  misc_feature (4)..(11): Crosslink between residues
  MOD_RES (11)..(11): Two pentenyl-alanine olefin side chains, each of which is crosslinked to another amino acid as indicated
  misc_feature (11)..(14): Crosslink between residues
  MOD_RES (15)..(15): Alpha-Me R5-pentenyl-alanine olefin amino acid connected by an all-carbon crosslinker comprising one double bond
  C-term NH2
LTFAEYWAQLAAAAAAA

SEQ ID NO: 636 - protein, 18 aa, Artificial Sequence
  Description of Artificial Sequence: Synthetic peptide
  N-term Ac
  MOD_RES (4)..(4): Alpha-Me R8-octenyl-alanine olefin amino acid connected by an all-carbon crosslinker comprising one double bond
  misc_feature (4)..(11): Crosslink between residues
  MOD_RES (11)..(11): Alpha-Me S5-pentenyl-alanine olefin amino acid connected by an all-carbon crosslinker comprising one double bond
  MOD_RES (13)..(13): Alpha-Me S5-pentenyl-alanine olefin amino acid connected by an all-carbon crosslinker comprising one double bond
  misc_feature (13)..(17): Crosslink between residues
  MOD_RES (17)..(17): Alpha-Me S5-pentenyl-alanine olefin amino acid connected by an all-carbon crosslinker comprising one double bond
  C-term NH2
LTFAEYWAQLAAAAAAAA

SEQ ID NO: 637 - protein, 19 aa, Artificial Sequence
  Description of Artificial Sequence: Synthetic peptide
  N-term Ac
  MOD_RES (4)..(4): Alpha-Me R8-octenyl-alanine olefin amino acid connected by an all-carbon crosslinker comprising one double bond
  misc_feature (4)..(11): Crosslink between residues
  MOD_RES (11)..(11): Alpha-Me S5-pentenyl-alanine olefin amino acid connected by an all-carbon crosslinker comprising one double bond
  MOD_RES (14)..(14): Alpha-Me S5-pentenyl-alanine olefin amino acid connected by an all-carbon crosslinker comprising one double bond
  misc_feature (14)..(18): Crosslink between residues
  MOD_RES (18)..(18): Alpha-Me S5-pentenyl-alanine olefin amino acid connected by an all-carbon crosslinker comprising one double bond
  C-term NH2
LTFAEYWAQLAAAAAAAAA

SEQ ID NO: 638 - protein, 20 aa, Artificial Sequence
  Description of Artificial Sequence: Synthetic peptide
  N-term Ac
  MOD_RES (4)..(4): Alpha-Me R8-octenyl-alanine olefin amino acid connected by an all-carbon crosslinker comprising one double bond
  misc_feature (4)..(11): Crosslink between residues
  MOD_RES (11)..(11): Alpha-Me S5-pentenyl-alanine olefin amino acid connected by an all-carbon crosslinker comprising one double bond
  MOD_RES (15)..(15): Alpha-Me S5-pentenyl-alanine olefin amino acid connected by an all-carbon crosslinker comprising one double bond
  misc_feature (15)..(19): Crosslink between residues
  MOD_RES (19)..(19): Alpha-Me S5-pentenyl-alanine olefin amino acid connected by an all-carbon crosslinker comprising one double bond
  C-term NH2
LTFAEYWAQLAAAAAAAAAA

SEQ ID NO: 639 - protein, 17 aa, Artificial Sequence
  Description of Artificial Sequence: Synthetic peptide
  N-term Ac
  MOD_RES (7)..(7): Alpha-Me R8-octenyl-alanine olefin amino acid connected by an all-carbon crosslinker comprising one double bond
  misc_feature (7)..(14): Crosslink between residues
  MOD_RES (14)..(14): Alpha-Me S5-pentenyl-alanine olefin amino acid connected by an all-carbon crosslinker comprising one double bond
  C-term OH
AAALTFAEYWAQLAAAA

SEQ ID NO: 640 - protein, 17 aa, Artificial Sequence
  Description of Artificial Sequence: Synthetic peptide
  N-term Ac
  MOD_RES (7)..(7): Alpha-Me R8-octenyl-alanine olefin amino acid connected by an all-carbon crosslinker comprising one double bond
  misc_feature (7)..(14): Crosslink between residues
  MOD_RES (14)..(14): Alpha-Me S5-pentenyl-alanine olefin amino acid connected by an all-carbon crosslinker comprising one double bond
  C-term NH2
AAALTFAEYWAQLAAAA

SEQ ID NO: 641 - protein, 18 aa, Artificial Sequence
  Description of Artificial Sequence: Synthetic peptide
  N-term Ac
  MOD_RES (8)..(8): Alpha-Me R8-octenyl-alanine olefin amino acid connected by an all-carbon crosslinker comprising one double bond
  misc_feature (8)..(15): Crosslink between residues
  MOD_RES (15)..(15): Alpha-Me S5-pentenyl-alanine olefin amino acid connected by an all-carbon crosslinker comprising one double bond
  C-term NH2
AAAALTFAEYWAQLAAAA

SEQ ID NO: 642 - protein, 19 aa, Artificial Sequence
  Description of Artificial Sequence: Synthetic peptide
  N-term Ac
  MOD_RES (9)..(9): Alpha-Me R8-octenyl-alanine olefin amino acid connected by an all-carbon crosslinker comprising one double bond
  misc_feature (9)..(16): Crosslink between residues
  MOD_RES (16)..(16): Alpha-Me S5-pentenyl-alanine olefin amino acid connected by an all-carbon crosslinker comprising one double bond
  C-term NH2
AAAAALTFAEYWAQLAAAA

SEQ ID NO: 643 - protein, 20 aa, Artificial Sequence
  Description of Artificial Sequence: Synthetic peptide
  N-term Ac
  MOD_RES (10)..(10): Alpha-Me R8-octenyl-alanine olefin amino acid connected by an all-carbon crosslinker comprising one double bond
  misc_feature (10)..(17): Crosslink between residues
  MOD_RES (17)..(17): Alpha-Me S5-pentenyl-alanine olefin amino acid connected by an all-carbon crosslinker comprising one double bond
  C-term NH2
AAAAAALTFAEYWAQLAAAA

SEQ ID NO: 644 - protein, 14 aa, Artificial Sequence
  Description of Artificial Sequence: Synthetic peptide
  N-term Ac
  MOD_RES (4)..(4): Alpha-Me R6-hexynyl-alanine alkynyl amino acids, crosslink via a dialkyne bond with a second alkynyl amino acid
  misc_feature (4)..(11): Crosslink between residues
  MOD_RES (10)..(10): Cyclobutyl-Ala
  MOD_RES (11)..(11): Alpha-Me S6-hexynyl-alanine alkynyl amino acid wherein the alkyne forms one half of a dialkyne bond with a second alkynyl amino acid
  C-term NH2
LTFAEYWAQAASAA

SEQ ID NO: 645 - protein, 12 aa, Artificial Sequence
  Description of Artificial Sequence: Synthetic peptide
  N-term Ac
  MOD_RES (1)..(1): D-amino acid
  MOD_RES (2)..(2): Alpha-Me R5-pentenyl-alanine olefin amino acid connected by an all-carbon crosslinker comprising one double bond
  misc_feature (2)..(6): Crosslink between residues
  MOD_RES (3)..(5): D-amino acid
  MOD_RES (6)..(6): Alpha-Me R5-pentenyl-alanine olefin amino acid connected by an all-carbon crosslinker comprising one double bond
  MOD_RES (7)..(7): D-Phe-4CF3
  MOD_RES (8)..(12): D-amino acid
  C-term NH2
TAWYAAFEKLLR

SEQ ID NO: 646 - protein, 12 aa, Artificial Sequence
  Description of Artificial Sequence: Synthetic peptide
  N-term Ac
  MOD_RES (1)..(4): D-amino acid
  MOD_RES (5)..(5): Alpha-Me R5-pentenyl-alanine olefin amino acid connected by an all-carbon crosslinker comprising one double bond
  misc_feature (5)..(9): Crosslink between residues
  MOD_RES (6)..(6): D-amino acid
  MOD_RES (7)..(7): D-Phe-4CF3
  MOD_RES (8)..(8): D-amino acid
  MOD_RES (9)..(9): Alpha-Me R5-pentenyl-alanine olefin amino acid connected by an all-carbon crosslinker comprising one double bond
  MOD_RES (10)..(12): D-amino acid
  C-term NH2
TAWYANFEALLR

SEQ ID NO: 647 - protein, 12 aa, Artificial Sequence
  Description of Artificial Sequence: Synthetic peptide
  N-term Ac
  MOD_RES (1)..(5): D-amino acid
  MOD_RES (6)..(6): Alpha-Me R5-pentenyl-alanine olefin amino acid connected by an all-carbon crosslinker comprising one double bond
  misc_feature (6)..(10): Crosslink between residues
  MOD_RES (7)..(7): D-Phe-4CF3
  MOD_RES (8)..(9): D-amino acid
  MOD_RES (10)..(10): Alpha-Me R5-pentenyl-alanine olefin amino acid connected by an all-carbon crosslinker comprising one double bond
  MOD_RES (11)..(12): D-amino acid
  C-term NH2
TAWYAAFEKALR

SEQ ID NO: 648 - protein, 14 aa, Artificial Sequence
  Description of Artificial Sequence: Synthetic peptide
  N-term Ac
  MOD_RES (1)..(6): D-amino acid
  MOD_RES (7)..(7): D-Phe-4CF3
  MOD_RES (8)..(8): D-amino acid
  MOD_RES (9)..(9): Alpha-Me R5-pentenyl-alanine olefin amino acid connected by an all-carbon crosslinker comprising one double bond
  misc_feature (9)..(13): Crosslink between residues
  MOD_RES (10)..(12): D-amino acid
  MOD_RES (13)..(13): Alpha-Me R5-pentenyl-alanine olefin amino acid connected by an all-carbon crosslinker comprising one double bond
  MOD_RES (14)..(14): D-amino acid
  C-term NH2
TAWYANFEALLRAA

SEQ ID NO: 649 - protein, 12 aa, Artificial Sequence
  Description of Artificial Sequence: Synthetic peptide
  N-term Ac
  MOD_RES (1)..(1): D-amino acid
  MOD_RES (2)..(2): Alpha-Me S8-octenyl-alanine olefin amino acid connected by an all-carbon crosslinker comprising one double bond
  misc_feature (2)..(9): Crosslink between residues
  MOD_RES (3)..(6): D-amino acid
  MOD_RES (7)..(7): D-Phe-4CF3
  MOD_RES (8)..(8): D-amino acid
  MOD_RES (9)..(9): Alpha-Me R5-pentenyl-alanine olefin amino acid connected by an all-carbon crosslinker comprising one double bond
  MOD_RES (10)..(12): D-amino acid
  C-term NH2
TAWYANFEALLR

SEQ ID NO: 650 - protein, 13 aa, Artificial Sequence
  Description of Artificial Sequence: Synthetic peptide
  N-term Ac
  MOD_RES (1)..(4): D-amino acid
  MOD_RES (5)..(5): Alpha-Me S8-octenyl-alanine olefin amino acid connected by an all-carbon crosslinker comprising one double bond
  misc_feature (5)..(12): Crosslink between residues
  MOD_RES (6)..(6): D-amino acid
  MOD_RES (7)..(7): D-Phe-4CF3
  MOD_RES (8)..(11): D-amino acid
  MOD_RES (12)..(12): Alpha-Me R5-pentenyl-alanine olefin amino acid connected by an all-carbon crosslinker comprising one double bond
  MOD_RES (13)..(13): D-amino acid
  C-term NH2
TAWYANFEKLLAA

SEQ ID NO: 651 - protein, 14 aa, Artificial Sequence
  Description of Artificial Sequence: Synthetic peptide
  N-term Ac
  MOD_RES (1)..(5): D-amino acid
  MOD_RES (6)..(6): Alpha-Me S8-octenyl-alanine olefin amino acid connected by an all-carbon crosslinker comprising one double bond
  misc_feature (6)..(13): Crosslink between residues
  MOD_RES (7)..(7): D-Phe-4CF3
  MOD_RES (8)..(12): D-amino acid
  MOD_RES (13)..(13): Alpha-Me R5-pentenyl-alanine olefin amino acid connected by an all-carbon crosslinker comprising one double bond
  MOD_RES (14)..(14): D-amino acid
  C-term NH2
TAWYAAFEKLLRAA

SEQ ID NO: 652 - protein, 13 aa, Artificial Sequence
  Description of Artificial Sequence: Synthetic peptide
  N-term Ac
  MOD_RES (1)..(4): D-amino acid
  MOD_RES (5)..(5): Alpha-Me S8-octenyl-alanine olefin amino acid connected by an all-carbon crosslinker comprising one double bond
  misc_feature (5)..(12): Crosslink between residues
  MOD_RES (6)..(11): D-amino acid
  MOD_RES (12)..(12): Alpha-Me R5-pentenyl-alanine olefin amino acid connected by an all-carbon crosslinker comprising one double bond
  MOD_RES (13)..(13): D-amino acid
  C-term NH2
TAWYANAEKLLAA

SEQ ID NO: 653 - protein, 14 aa, Artificial Sequence
  Description of Artificial Sequence: Synthetic peptide
  N-term 5-FAM
  MOD_RES (1)..(1): Beta-Ala
  MOD_RES (2)..(5): D-amino acid
  MOD_RES (6)..(6): Alpha-Me S8-octenyl-alanine olefin amino acid connected by an all-carbon crosslinker comprising one double bond
  misc_feature (6)..(13): Crosslink between residues
  MOD_RES (7)..(7): D-amino acid
  MOD_RES (8)..(8): D-Phe-4CF3
  MOD_RES (9)..(12): D-amino acid
  MOD_RES (13)..(13): Alpha-Me R5-pentenyl-alanine olefin amino acid connected by an all-carbon crosslinker comprising one double bond
  MOD_RES (14)..(14): D-amino acid
  C-term NH2
ATAWYANFEKLLAA

SEQ ID NO: 654 - protein, 14 aa, Artificial Sequence
  Description of Artificial Sequence: Synthetic peptide
  N-term 5-FAM
  MOD_RES (1)..(1): Beta-Ala
  MOD_RES (2)..(5): D-amino acid
  MOD_RES (6)..(6): Alpha-Me S8-octenyl-alanine olefin amino acid connected by an all-carbon crosslinker comprising one double bond
  misc_feature (6)..(13): Crosslink between residues
  MOD_RES (7)..(12): D-amino acid
  MOD_RES (13)..(13): Alpha-Me R5-pentenyl-alanine olefin amino acid connected by an all-carbon crosslinker comprising one double bond
  MOD_RES (14)..(14): D-amino acid
  C-term NH2
ATAWYANAEKLLAA

SEQ ID NO: 655 - protein, 13 aa, Artificial Sequence
  Description of Artificial Sequence: Synthetic peptide
  N-term Ac
  MOD_RES (1)..(4): D-amino acid
  MOD_RES (5)..(5): Alpha-Me S8-octenyl-alanine olefin amino acid connected by an all-carbon crosslinker comprising one double bond
  misc_feature (5)..(12): Crosslink between residues
  MOD_RES (6)..(6): D-amino acid
  MOD_RES (7)..(7): D-Phe-4CF3
  MOD_RES (8)..(11): D-amino acid
  MOD_RES (12)..(12): Alpha-Me R5-pentenyl-alanine olefin amino acid connected by an all-carbon crosslinker comprising one double bond
  MOD_RES (13)..(13): D-amino acid
  C-term NH2
TAWYANFEALLAA

SEQ ID NO: 656 - protein, 17 aa, Artificial Sequence
  Description of Artificial Sequence: Synthetic peptide
  N-term Ac
  MOD_RES (1)..(4): D-amino acid
  MOD_RES (5)..(5): Alpha-Me S8-octenyl-alanine olefin amino acid connected by an all-carbon crosslinker comprising one double bond
  misc_feature (5)..(12): Crosslink between residues
  MOD_RES (6)..(6): D-amino acid
  MOD_RES (7)..(7): D-Phe-4CF3
  MOD_RES (8)..(11): D-amino acid
  MOD_RES (12)..(12): Alpha-Me R5-pentenyl-alanine olefin amino acid connected by an all-carbon crosslinker comprising one double bond
  MOD_RES (13)..(17): D-amino acid
  C-term NH2
TAWYANFEKLLAAAAAA

SEQ ID NO: 657 - protein, 17 aa, Artificial Sequence
  Description of Artificial Sequence: Synthetic peptide
  N-term Ac
  MOD_RES (1)..(4): D-amino acid
  MOD_RES (5)..(5): Alpha-Me S8-octenyl-alanine olefin amino acid connected by an all-carbon crosslinker comprising one double bond
  misc_feature (5)..(12): Crosslink between residues
  MOD_RES (6)..(6): D-amino acid
  MOD_RES (7)..(7): D-Phe-4CF3
  MOD_RES (8)..(11): D-amino acid
  MOD_RES (12)..(12): Alpha-Me R5-pentenyl-alanine olefin amino acid connected by an all-carbon crosslinker comprising one double bond
  MOD_RES (13)..(17): D-amino acid
  C-term NH2
TAWYANFEALLAAAAAA

SEQ ID NO: 658 - protein, 15 aa, Artificial Sequence
  Description of Artificial Sequence: Synthetic peptide
  N-term Ac
  MOD_RES (4)..(4): Alpha-Me R8-octenyl-alanine olefin amino acid connected by an all-carbon crosslinker comprising one double bond
  misc_feature (4)..(11): Crosslink between residues
  MOD_RES (6)..(6): 4-carboxy Phe
  MOD_RES (10)..(10): Cyclobutyl-Ala
  MOD_RES (11)..(11): Alpha-Me S5-pentenyl-alanine olefin amino acid connected by an all-carbon crosslinker comprising one double bond
  MOD_RES (14)..(14): Norleucine
  C-term NH2
LTFAEFWAQAASALA

SEQ ID NO: 659 - protein, 17 aa, Artificial Sequence
  Description of Artificial Sequence: Synthetic peptide
  N-term Ac
  MOD_RES (4)..(4): Alpha-Me R8-octenyl-alanine olefin amino acid connected by an all-carbon crosslinker comprising one double bond
  misc_feature (4)..(11): Crosslink between residues
  MOD_RES (11)..(11): Alpha-Me S5-pentenyl-alanine olefin amino acid connected by an all-carbon crosslinker comprising one double bond
  MOD_RES (17)..(17): D-amino acid
  C-term NH2
LTFAEYWAQLAAAAAAA

SEQ ID NO: 660 - protein, 17 aa, Artificial Sequence
  Description of Artificial Sequence: Synthetic peptide
  N-term Ac
  MOD_RES (4)..(4): Alpha-Me R8-octenyl-alanine olefin amino acid connected by an all-carbon crosslinker comprising one double bond
  misc_feature (4)..(11): Crosslink between residues
  MOD_RES (7)..(7): 6cl-Trp
  MOD_RES (11)..(11): Alpha-Me S5-pentenyl-alanine olefin amino acid connected by an all-carbon crosslinker comprising one double bond
  MOD_RES (17)..(17): D-amino acid
  C-term NH2
LTFAEYWAQLAAAAAAA

SEQ ID NO: 661 - protein, 20 aa, Artificial Sequence
  Description of Artificial Sequence: Synthetic peptide
  N-term Ac
  MOD_RES (7)..(7): Alpha-Me R8-octenyl-alanine olefin amino acid connected by an all-carbon crosslinker comprising one double bond
  misc_feature (7)..(14): Crosslink between residues
  MOD_RES (14)..(14): Alpha-Me S5-pentenyl-alanine olefin amino acid connected by an all-carbon crosslinker comprising one double bond
  MOD_RES (20)..(20): D-amino acid
  C-term NH2
AAALTFAEYWAQLAAAAAAA

SEQ ID NO: 662 - protein, 17 aa, Artificial Sequence
  Description of Artificial Sequence: Synthetic peptide
  N-term Ac
  MOD_RES (3)..(3): 3,4-difluoro Phe
  MOD_RES (4)..(4): Alpha-Me R8-octenyl-alanine olefin amino acid connected by an all-carbon crosslinker comprising one double bond
  misc_feature (4)..(11): Crosslink between residues
  MOD_RES (11)..(11): Alpha-Me S5-pentenyl-alanine olefin amino acid connected by an all-carbon crosslinker comprising one double bond
  MOD_RES (17)..(17): D-amino acid
  C-term NH2
LTFAEYWAQLAAAAAAA

SEQ ID NO: 663 - protein, 17 aa, Artificial Sequence
  Description of Artificial Sequence: Synthetic peptide
  N-term Ac
  MOD_RES (4)..(4): Alpha-Me R8-octenyl-alanine olefin amino acid connected by an all-carbon crosslinker comprising one double bond
  misc_feature (4)..(11): Crosslink between residues
  MOD_RES (11)..(11): Alpha-Me S5-pentenyl-alanine olefin amino acid connected by an all-carbon crosslinker comprising one double bond
  MOD_RES (13)..(13): 2-aminoisobutyric acid
  MOD_RES (17)..(17): D-amino acid
  C-term NH2
LTFAEYWAQLAAXAAAA

SEQ ID NO: 664 - protein, 17 aa, Artificial Sequence
  Description of Artificial Sequence: Synthetic peptide
  N-term Ac
  MOD_RES (4)..(4): Alpha-Me R8-octenyl-alanine olefin amino acid connected by an all-carbon crosslinker comprising one double bond
  misc_feature (4)..(11): Crosslink between residues
  MOD_RES (11)..(11): Alpha-Me S5-pentenyl-alanine olefin amino acid connected by an all-carbon crosslinker comprising one double bond
  MOD_RES (15)..(15): 2-aminoisobutyric acid
  MOD_RES (17)..(17): D-amino acid
  C-term NH2
LTFAEYWAQLAAAAXAA

SEQ ID NO: 665 - protein, 17 aa, Artificial Sequence
  Description of Artificial Sequence: Synthetic peptide
  N-term Ac
  MOD_RES (4)..(4): Alpha-Me R8-octenyl-alanine olefin amino acid connected by an all-carbon crosslinker comprising one double bond
  misc_feature (4)..(11): Crosslink between residues
  MOD_RES (11)..(11): Alpha-Me S5-pentenyl-alanine olefin amino acid connected by an all-carbon crosslinker comprising one double bond
  MOD_RES (16)..(16): 2-aminoisobutyric acid
  MOD_RES (17)..(17): D-amino acid
  C-term NH2
LTFAEYWAQLAAAAAXA

SEQ ID NO: 666 - protein, 17 aa, Artificial Sequence
  Description of Artificial Sequence: Synthetic peptide
  N-term Ac
  MOD_RES (4)..(4): Alpha-Me R8-octenyl-alanine olefin amino acid connected by an all-carbon crosslinker comprising one double bond
  misc_feature (4)..(11): Crosslink between residues
  MOD_RES (11)..(11): Alpha-Me S5-pentenyl-alanine olefin amino acid connected by an all-carbon crosslinker comprising one double bond
  MOD_RES (17)..(17): 2-aminoisobutyric acid
  C-term NH2
LTFAEYWAQLAAAAAAX

SEQ ID NO: 667 - protein, 17 aa, Artificial Sequence
  Description of Artificial Sequence: Synthetic peptide
  N-term Ac
  MOD_RES (4)..(4): Alpha-Me R8-octenyl-alanine olefin amino acid connected by an all-carbon crosslinker comprising one double bond
  misc_feature (4)..(11): Crosslink between residues
  MOD_RES (11)..(11): Alpha-Me S5-pentenyl-alanine olefin amino acid connected by an all-carbon crosslinker comprising one double bond
  MOD_RES (16)..(17): D-amino acid
  C-term NH2
LTFAEYWAQLAAAAAAA

SEQ ID NO: 668 - protein, 17 aa, Artificial Sequence
  Description of Artificial Sequence: Synthetic peptide
  N-term Ac
  MOD_RES (4)..(4): Alpha-Me R8-octenyl-alanine olefin amino acid connected by an all-carbon crosslinker comprising one double bond
  misc_feature (4)..(11): Crosslink between residues
  MOD_RES (11)..(11): Alpha-Me S5-pentenyl-alanine olefin amino acid connected by an all-carbon crosslinker comprising one double bond
  C-term NH2
LTFAEYWAQLAAAAAAA

SEQ ID NO: 669 - protein, 17 aa, Artificial Sequence
  Description of Artificial Sequence: Synthetic peptide
  N-term Ac
  MOD_RES (4)..(4): Alpha-Me R8-octenyl-alanine olefin amino acid connected by an all-carbon crosslinker comprising one double bond
  misc_feature (4)..(11): Crosslink between residues
  MOD_RES (11)..(11): Alpha-Me S5-pentenyl-alanine olefin amino acid connected by an all-carbon crosslinker comprising one double bond
  MOD_RES (17)..(17): Sarcosine
  C-term NH2
LTFAEYWAQLAAAAAAX

SEQ ID NO: 670 - protein, 17 aa, Artificial Sequence
  Description of Artificial Sequence: Synthetic peptide
  N-term Ac
  MOD_RES (4)..(4): Alpha-Me R8-octenyl-alanine olefin amino acid connected by an all-carbon crosslinker comprising one double bond
  misc_feature (4)..(11): Crosslink between residues
  MOD_RES (11)..(11): Alpha-Me S5-pentenyl-alanine olefin amino acid connected by an all-carbon crosslinker comprising one double bond
  MOD_RES (17)..(17): D-amino acid
  C-term OH
LTFAEYWAQLAAAAAAA

SEQ ID NO: 671 - protein, 17 aa, Artificial Sequence
  Description of Artificial Sequence: Synthetic peptide
  N-term Ac
  MOD_RES (4)..(4): Alpha-Me R6-hexynyl-alanine alkynyl amino acids, crosslink via a dialkyne bond with a second alkynyl amino acid
  misc_feature (4)..(11): Crosslink between residues
  MOD_RES (11)..(11): Alpha-Me S5-pentynyl-alanine alkynyl amino acids, wherein the alkyne forms one half of a dialkyne bond with a second alkynyl amino acid
  MOD_RES (17)..(17): D-amino acid
  C-term NH2
LTFAAYWAQLAAAAAAA

SEQ ID NO: 672 - protein, 15 aa, Artificial Sequence
  Description of Artificial Sequence: Synthetic peptide
  N-term 5-FAM
  MOD_RES (1)..(1): Beta-Ala
  MOD_RES (5)..(5): Alpha-Me R8-octenyl-alanine olefin amino acid connected by an all-carbon crosslinker comprising one double bond
  misc_feature (5)..(12): Crosslink between residues
  MOD_RES (11)..(11): Cyclobutyl-Ala
  MOD_RES (12)..(12): Alpha-Me S5-pentenyl-alanine olefin amino acid connected by an all-carbon crosslinker comprising one double bond
  C-term NH2
ALTFAEYWAQAASAA

SEQ ID NO: 673 - protein, 17 aa, Artificial Sequence
  Description of Artificial Sequence: Synthetic peptide
  N-term Ac
  MOD_RES (4)..(4): Alpha-Me R8-octenyl-alanine olefin amino acid connected by an all-carbon crosslinker comprising one double bond
  misc_feature (4)..(11): Crosslink between residues
  MOD_RES (6)..(6): 4-carboxy Phe
  MOD_RES (10)..(10): Cyclobutyl-Ala
  MOD_RES (11)..(11): Alpha-Me S5-pentenyl-alanine olefin amino acid connected by an all-carbon crosslinker comprising one double bond
  MOD_RES (17)..(17): D-amino acid
  C-term NH2
LTFAEFWAQAAAAAAAA

SEQ ID NO: 674 - protein, 17 aa, Artificial Sequence
  Description of Artificial Sequence: Synthetic peptide
  N-term Ac
  MOD_RES (4)..(4): Alpha-Me R8-octenyl-alanine olefin amino acid connected by an all-carbon crosslinker comprising one double bond
  misc_feature (4)..(11): Crosslink between residues
  MOD_RES (10)..(10): Cyclobutyl-Ala
  MOD_RES (11)..(11): Alpha-Me S5-pentenyl-alanine olefin amino acid connected by an all-carbon crosslinker comprising one double bond
  MOD_RES (17)..(17): D-amino acid
  C-term NH2
LTFAEYWAQAAAAAAAA

SEQ ID NO: 675 - protein, 16 aa, Artificial Sequence
  Description of Artificial Sequence: Synthetic peptide
  N-term Ac
  MOD_RES (3)..(3): Alpha-Me R8-octenyl-alanine olefin amino acid connected by an all-carbon crosslinker comprising one double bond
  misc_feature (3)..(10): Crosslink between residues
  MOD_RES (10)..(10): Alpha-Me S5-pentenyl-alanine olefin amino acid connected by an all-carbon crosslinker comprising one double bond
  MOD_RES (16)..(16): D-amino acid
  C-term NH2
TFAEYWAQLAAAAAAA

SEQ ID NO: 676 - protein, 15 aa, Artificial Sequence
  Description of Artificial Sequence: Synthetic peptide
  N-term Ac
  MOD_RES (2)..(2): Alpha-Me R8-octenyl-alanine olefin amino acid connected by an all-carbon crosslinker comprising one double bond
  misc_feature (2)..(9): Crosslink between residues
  MOD_RES (9)..(9): Alpha-Me S5-pentenyl-alanine olefin amino acid connected by an all-carbon crosslinker comprising one double bond
  MOD_RES (15)..(15): D-amino acid
  C-term NH2
FAEYWAQLAAAAAAA

SEQ ID NO: 677 - protein, 17 aa, Artificial Sequence
  Description of Artificial Sequence: Synthetic peptide
  N-term Ac
  MOD_RES (4)..(4): Alpha-Me R8-octenyl-alanine olefin amino acid connected by an all-carbon crosslinker comprising one double bond
  misc_feature (4)..(11): Crosslink between residues
  MOD_RES (11)..(11): Alpha-Me S5-pentenyl-alanine olefin amino acid connected by an all-carbon crosslinker comprising one double bond
  MOD_RES (17)..(17): D-amino acid
  C-term NH2
LVFAEYWAQLAAAAAAA

SEQ ID NO: 678 - protein, 17 aa, Artificial Sequence
  Description of Artificial Sequence: Synthetic peptide
  N-term Ac
  MOD_RES (4)..(4): Alpha-Me R8-octenyl-alanine olefin amino acid connected by an all-carbon crosslinker comprising one double bond
  misc_feature (4)..(11): Crosslink between residues
  MOD_RES (11)..(11): Alpha-Me S5-pentenyl-alanine olefin amino acid connected by an all-carbon crosslinker comprising one double bond
  MOD_RES (17)..(17): D-amino acid
  C-term NH2
AAFAEYWAQLAAAAAAA

SEQ ID NO: 679 - protein, 16 aa, Artificial Sequence
  Description of Artificial Sequence: Synthetic peptide
  N-term Ac
  MOD_RES (4)..(4): Alpha-Me R8-octenyl-alanine olefin amino acid connected by an all-carbon crosslinker comprising one double bond
  misc_feature (4)..(11): Crosslink between residues
  MOD_RES (11)..(11): Alpha-Me S5-pentenyl-alanine olefin amino acid connected by an all-carbon crosslinker comprising one double bond
  MOD_RES (16)..(16): D-amino acid
  C-term NH2
LTFAEYWAQLAAAAAA

SEQ ID NO: 680 - protein, 15 aa, Artificial Sequence
  Description of Artificial Sequence: Synthetic peptide
  N-term Ac
  MOD_RES (4)..(4): Alpha-Me R8-octenyl-alanine olefin amino acid connected by an all-carbon crosslinker comprising one double bond
  misc_feature (4)..(11): Crosslink between residues
  MOD_RES (11)..(11): Alpha-Me S5-pentenyl-alanine olefin amino acid connected by an all-carbon crosslinker comprising one double bond
  MOD_RES (15)..(15): D-amino acid
  C-term NH2
LTFAEYWAQLAAAAA

SEQ ID NO: 681 - protein, 14 aa, Artificial Sequence
  Description of Artificial Sequence: Synthetic peptide
  N-term Ac
  MOD_RES (4)..(4): Alpha-Me R8-octenyl-alanine olefin amino acid connected by an all-carbon crosslinker comprising one double bond
  misc_feature (4)..(11): Crosslink between residues
  MOD_RES (11)..(11): Alpha-Me S5-pentenyl-alanine olefin amino acid connected by an all-carbon crosslinker comprising one double bond
  MOD_RES (14)..(14): D-amino acid
  C-term NH2
LTFAEYWAQLAAAA

SEQ ID NO: 682 - protein, 13 aa, Artificial Sequence
  Description of Artificial Sequence: Synthetic peptide
  N-term Ac
  MOD_RES (4)..(4): Alpha-Me R8-octenyl-alanine olefin amino acid connected by an all-carbon crosslinker comprising one double bond
  misc_feature (4)..(11): Crosslink between residues
  MOD_RES (11)..(11): Alpha-Me S5-pentenyl-alanine olefin amino acid connected by an all-carbon crosslinker comprising one double bond
  MOD_RES (13)..(13): D-amino acid
  C-term NH2
LTFAEYWAQLAAA

SEQ ID NO: 683 - protein, 12 aa, Artificial Sequence
  Description of Artificial Sequence: Synthetic peptide
  N-term Ac
  MOD_RES (4)..(4): Alpha-Me R8-octenyl-alanine olefin amino acid connected by an all-carbon crosslinker comprising one double bond
  misc_feature (4)..(11): Crosslink between residues
  MOD_RES (11)..(11): Alpha-Me S5-pentenyl-alanine olefin amino acid connected by an all-carbon crosslinker comprising one double bond
  MOD_RES (12)..(12): D-amino acid
  C-term NH2
LTFAEYWAQLAA

SEQ ID NO: 684 - protein, 17 aa, Artificial Sequence
  Description of Artificial Sequence: Synthetic peptide
  N-term Ac
  MOD_RES (4)..(4): Alpha-Me R6-hexynyl-alanine alkynyl amino acids, crosslink via a dialkyne bond with a second alkynyl amino acid
  misc_feature (4)..(11): Crosslink between residues
  MOD_RES (11)..(11): Alpha-Me S6-hexynyl-alanine alkynyl amino acids, crosslink via a dialkyne bond with a second alkynyl amino acid
  MOD_RES (17)..(17): D-amino acid
  C-term NH2
  see specification as filed for detailed description of substitutions and preferred embodiments
LTFAEYWAQLAAAAAAA

SEQ ID NO: 685 - protein, 16 aa, Artificial Sequence
  Description of Artificial Sequence: Synthetic peptide
  MOD_RES (2)..(2): Alpha-Me R5-pentenyl-alanine olefin amino acid connected by an all-carbon crosslinker comprising one double bond
  misc_feature (2)..(9): Crosslink between residues
  MOD_RES (9)..(9): Alpha-Me S8-octenyl-alanine olefin amino acid connected by an all-carbon crosslinker comprising one double bond
LAQETFSDAWKLLPEN

SEQ ID NO: 686 - protein, 16 aa, Artificial Sequence
  Description of Artificial Sequence: Synthetic peptide
  MOD_RES (4)..(4): Alpha-Me R5-pentenyl-alanine olefin amino acid connected by an all-carbon crosslinker comprising one double bond
  misc_feature (4)..(11): Crosslink between residues
  MOD_RES (11)..(11): Alpha-Me S8-octenyl-alanine olefin amino acid connected by an all-carbon crosslinker comprising one double bond
LSQATFSDLWALLPEN

SEQ ID NO: 687 - protein, 16 aa, Artificial Sequence
  Description of Artificial Sequence: Synthetic peptide
  MOD_RES (5)..(5): Alpha-Me R5-pentenyl-alanine olefin amino acid connected by an all-carbon crosslinker comprising one double bond
  misc_feature (5)..(12): Crosslink between residues
  MOD_RES (12)..(12): Alpha-Me S8-octenyl-alanine olefin amino acid connected by an all-carbon crosslinker comprising one double bond
LSQEAFSDLWKALPEN

SEQ ID NO: 688 - protein, 16 aa, Artificial Sequence
  Description of Artificial Sequence: Synthetic peptide
  MOD_RES (6)..(6): Alpha-Me R5-pentenyl-alanine olefin amino acid connected by an all-carbon crosslinker comprising one double bond
  misc_feature (6)..(13): Crosslink between residues
  MOD_RES (13)..(13): Alpha-Me S8-octenyl-alanine olefin amino acid connected by an all-carbon crosslinker comprising one double bond
LSQETASDLWKLAPEN

SEQ ID NO: 689 - protein, 16 aa, Artificial Sequence
  Description of Artificial Sequence: Synthetic peptide
  MOD_RES (7)..(7): Alpha-Me R5-pentenyl-alanine olefin amino acid connected by an all-carbon crosslinker comprising one double bond
  misc_feature (7)..(14): Crosslink between residues
  MOD_RES (14)..(14): Alpha-Me S8-octenyl-alanine olefin amino acid connected by an all-carbon crosslinker comprising one double bond
LSQETFADLWKLLAEN

SEQ ID NO: 690 - protein, 16 aa, Artificial Sequence
  Description of Artificial Sequence: Synthetic peptide
  MOD_RES (2)..(2): Any amino acid
  MOD_RES (8)..(8): Alpha-Me R5-pentenyl-alanine olefin amino acid connected by an all-carbon crosslinker comprising one double bond
  misc_feature (8)..(15): Crosslink between residues
  MOD_RES (15)..(15): Alpha-Me S8-octenyl-alanine olefin amino acid connected by an all-carbon crosslinker comprising one double bond
LXQETFSALWKLLPAN

SEQ ID NO: 691 - protein, 16 aa, Artificial Sequence
  Description of Artificial Sequence: Synthetic peptide
  MOD_RES (9)..(9): Alpha-Me R5-pentenyl-alanine olefin amino acid connected by an all-carbon crosslinker comprising one double bond
  misc_feature (9)..(16): Crosslink between residues
  MOD_RES (16)..(16): Alpha-Me S8-octenyl-alanine olefin amino acid connected by an all-carbon crosslinker comprising one double bond
LSQETFSDAWKLLPEA

SEQ ID NO: 692 - protein, 16 aa, Artificial Sequence
  Description of Artificial Sequence: Synthetic peptide
  MOD_RES (7)..(7): Alpha-Me R5-pentenyl-alanine olefin amino acid connected by an all-carbon crosslinker comprising one double bond
  misc_feature (7)..(14): Crosslink between residues
  MOD_RES (14)..(14): Alpha-Me S8-octenyl-alanine olefin amino acid connected by an all-carbon crosslinker comprising one double bond
LSQQTFADLWKLLAEN

SEQ ID NO: 693 - protein, 16 aa, Artificial Sequence
  Description of Artificial Sequence: Synthetic peptide
  MOD_RES (7)..(7): Alpha-Me R5-pentenyl-alanine olefin amino acid connected by an all-carbon crosslinker comprising one double bond
  misc_feature (7)..(14): Crosslink between residues
  MOD_RES (14)..(14): Alpha-Me S8-octenyl-alanine olefin amino acid connected by an all-carbon crosslinker comprising one double bond
LSQETFADLWKLLAQN

SEQ ID NO: 694 - protein, 16 aa, Artificial Sequence
  Description of Artificial Sequence: Synthetic peptide
  MOD_RES (7)..(7): Alpha-Me R5-pentenyl-alanine olefin amino acid connected by an all-carbon crosslinker comprising one double bond
  misc_feature (7)..(14): Crosslink between residues
  MOD_RES (14)..(14): Alpha-Me S8-octenyl-alanine olefin amino acid connected by an all-carbon crosslinker comprising one double bond
LSQQTFADLWKLLAQN

SEQ ID NO: 695 - protein, 16 aa, Artificial Sequence
  Description of Artificial Sequence: Synthetic peptide
  MOD_RES (7)..(7): Alpha-Me R5-pentenyl-alanine olefin amino acid connected by an all-carbon crosslinker comprising one double bond
  misc_feature (7)..(14): Crosslink between residues
  MOD_RES (14)..(14): Alpha-Me S8-octenyl-alanine olefin amino acid connected by an all-carbon crosslinker comprising one double bond
LSQETFANLWKLLAQN

SEQ ID NO: 696 - protein, 16 aa, Artificial Sequence
  Description of Artificial Sequence: Synthetic peptide
  MOD_RES (7)..(7): Alpha-Me R5-pentenyl-alanine olefin amino acid connected by an all-carbon crosslinker comprising one double bond
  misc_feature (7)..(14): Crosslink between residues
  MOD_RES (14)..(14): Alpha-Me S8-octenyl-alanine olefin amino acid connected by an all-carbon crosslinker comprising one double bond
LSQQTFANLWKLLAQN

SEQ ID NO: 697 - protein, 16 aa, Artificial Sequence
  Description of Artificial Sequence: Synthetic peptide
  MOD_RES (7)..(7): Alpha-Me R5-pentenyl-alanine olefin amino acid connected by an all-carbon crosslinker comprising one double bond
  misc_feature (7)..(14): Crosslink between residues
  MOD_RES (14)..(14): Alpha-Me S8-octenyl-alanine olefin amino acid connected by an all-carbon crosslinker comprising one double bond
LSQQTFANLWRLLAQN

SEQ ID NO: 698 - protein, 16 aa, Artificial Sequence
  Description of Artificial Sequence: Synthetic peptide
  MOD_RES (7)..(7): Alpha-Me R5-pentenyl-alanine olefin amino acid connected by an all-carbon crosslinker comprising one double bond
  misc_feature (7)..(14): Crosslink between residues
  MOD_RES (14)..(14): Alpha-Me S8-octenyl-alanine olefin amino acid connected by an all-carbon crosslinker comprising one double bond
QSQQTFANLWKLLAQN

SEQ ID NO: 699 - protein, 16 aa, Artificial Sequence
  Description of Artificial Sequence: Synthetic peptide
  MOD_RES (7)..(7): Alpha-Me R5-pentenyl-alanine olefin amino acid connected by an all-carbon crosslinker comprising one double bond
  misc_feature (7)..(14): Crosslink between residues
  MOD_RES (14)..(14): Alpha-Me S8-octenyl-alanine olefin amino acid connected by an all-carbon crosslinker comprising one double bond
QSQQTFANLWRLLAQN

SEQ ID NO: 700 - protein, 16 aa, Artificial Sequence
  Description of Artificial Sequence: Synthetic peptide
  MOD_RES (7)..(7): Alpha-Me R5-pentenyl-alanine olefin amino acid connected by an all-carbon crosslinker comprising one double bond
  misc_feature (7)..(14): Crosslink between residues
  MOD_RES (14)..(14): Alpha-Me S8-octenyl-alanine olefin amino acid connected by an all-carbon crosslinker comprising one double bond
QSQQTAANLWRLLAQN

SEQ ID NO: 701 - protein, 16 aa, Artificial Sequence
  Description of Artificial Sequence: Synthetic peptide
  MOD_RES (2)..(2): Alpha-Me R8-octenyl-alanine olefin amino acid connected by an all-carbon crosslinker comprising one double bond
  misc_feature (2)..(9): Crosslink between residues
  MOD_RES (9)..(9): Alpha-Me S5-pentenyl-alanine olefin amino acid connected by an all-carbon crosslinker comprising one double bond
LAQETFSDAWKLLPEN

SEQ ID NO: 702 - protein, 16 aa, Artificial Sequence
  Description of Artificial Sequence: Synthetic peptide
  MOD_RES (4)..(4): Alpha-Me R8-octenyl-alanine olefin amino acid connected by an all-carbon crosslinker comprising one double bond
  misc_feature (4)..(11): Crosslink between residues
  MOD_RES (11)..(11): Alpha-Me S5-pentenyl-alanine olefin amino acid connected by an all-carbon crosslinker comprising one double bond
LSQATFSDLWALLPEN

SEQ ID NO: 703 - protein, 16 aa, Artificial Sequence
  Description of Artificial Sequence: Synthetic peptide
  MOD_RES (5)..(5): Alpha-Me R8-octenyl-alanine olefin amino acid connected by an all-carbon crosslinker comprising one double bond
  misc_feature (5)..(12): Crosslink between residues
  MOD_RES (12)..(12): Alpha-Me S5-pentenyl-alanine olefin amino acid connected by an all-carbon crosslinker comprising one double bond
LSQEAFSDLWKALPEN

SEQ ID NO: 704 - protein, 16 aa, Artificial Sequence
  Description of Artificial Sequence: Synthetic peptide
  MOD_RES (6)..(6): Alpha-Me R8-octenyl-alanine olefin amino acid connected by an all-carbon crosslinker comprising one double bond
  misc_feature (6)..(13): Crosslink between residues
  MOD_RES (13)..(13): Alpha-Me S5-pentenyl-alanine olefin amino acid connected by an all-carbon crosslinker comprising one double bond
LSQETASDLWKLAPEN

SEQ ID NO: 705 - protein, 16 aa, Artificial Sequence
  Description of Artificial Sequence: Synthetic peptide
  MOD_RES (7)..(7): Alpha-Me R8-octenyl-alanine olefin amino acid connected by an all-carbon crosslinker comprising one double bond
  misc_feature (7)..(14): Crosslink between residues
  MOD_RES (14)..(14): Alpha-Me S5-pentenyl-alanine olefin amino acid connected by an all-carbon crosslinker comprising one double bond
LSQETFADLWKLLAEN

SEQ ID NO: 706 - protein, 16 aa, Artificial Sequence
  Description of Artificial Sequence: Synthetic peptide
  MOD_RES (2)..(2): Any amino acid
  MOD_RES (8)..(8): Alpha-Me R8-octenyl-alanine olefin amino acid connected by an all-carbon crosslinker comprising one double bond
  misc_feature (8)..(15): Crosslink between residues
  MOD_RES (15)..(15): Alpha-Me S5-pentenyl-alanine olefin amino acid connected by an all-carbon crosslinker comprising one double bond
LXQETFSALWKLLPAN

SEQ ID NO: 707 - protein, 16 aa, Artificial Sequence
  Description of Artificial Sequence: Synthetic peptide
  MOD_RES (9)..(9): Alpha-Me R8-octenyl-alanine olefin amino acid connected by an all-carbon crosslinker comprising one double bond
  misc_feature (9)..(16): Crosslink between residues
  MOD_RES (16)..(16): Alpha-Me S5-pentenyl-alanine olefin amino acid connected by an all-carbon crosslinker comprising one double bond
LSQETFSDAWKLLPEA

SEQ ID NO: 708 - protein, 16 aa, Artificial Sequence
  Description of Artificial Sequence: Synthetic peptide
  MOD_RES (7)..(7): Alpha-Me R8-octenyl-alanine olefin amino acid connected by an all-carbon crosslinker comprising one double bond
  misc_feature (7)..(14): Crosslink between residues
  MOD_RES (14)..(14): Alpha-Me S5-pentenyl-alanine olefin amino acid connected by an all-carbon crosslinker comprising one double bond
LSQQTFADLWKLLAEN

SEQ ID NO: 709 - protein, 16 aa, Artificial Sequence
  Description of Artificial Sequence: Synthetic peptide
  MOD_RES (7)..(7): Alpha-Me R8-octenyl-alanine olefin amino acid connected by an all-carbon crosslinker comprising one double bond
  misc_feature (7)..(14): Crosslink between residues
  MOD_RES (14)..(14): Alpha-Me S5-pentenyl-alanine olefin amino acid connected by an all-carbon crosslinker comprising one double bond
LSQETFADLWKLLAQN

SEQ ID NO: 710 - protein, 16 aa, Artificial Sequence
  Description of Artificial Sequence: Synthetic peptide
  MOD_RES (7)..(7): Alpha-Me R8-octenyl-alanine olefin amino acid connected by an all-carbon crosslinker comprising one double bond
  misc_feature (7)..(14): Crosslink between residues
  MOD_RES (14)..(14): Alpha-Me S5-pentenyl-alanine olefin amino acid connected by an all-carbon crosslinker comprising one double bond
LSQQTFADLWKLLAQN

SEQ ID NO: 711 - protein, 16 aa, Artificial Sequence
  Description of Artificial Sequence: Synthetic peptide
  MOD_RES (7)..(7): Alpha-Me R8-octenyl-alanine olefin amino acid connected by an all-carbon crosslinker comprising one double bond
  misc_feature (7)..(14): Crosslink between residues
  MOD_RES (14)..(14): Alpha-Me S5-pentenyl-alanine olefin amino acid connected by an all-carbon crosslinker comprising one double bond
LSQETFANLWKLLAQN

SEQ ID NO: 712 - protein, 16 aa, Artificial Sequence
  Description of Artificial Sequence: Synthetic peptide
  MOD_RES (7)..(7): Alpha-Me R8-octenyl-alanine olefin amino acid connected by an all-carbon crosslinker comprising one double bond
  misc_feature (7)..(14): Crosslink between residues
  MOD_RES (14)..(14): Alpha-Me S5-pentenyl-alanine olefin amino acid connected by an all-carbon crosslinker comprising one double bond
LSQQTFANLWKLLAQN

SEQ ID NO: 713 - protein, 16 aa, Artificial Sequence
  Description of Artificial Sequence: Synthetic peptide
  MOD_RES (7)..(7): Alpha-Me R8-octenyl-alanine olefin amino acid connected by an all-carbon crosslinker comprising one double bond
  misc_feature (7)..(14): Crosslink between residues
  MOD_RES (14)..(14): Alpha-Me S5-pentenyl-alanine olefin amino acid connected by an all-carbon crosslinker comprising one double bond
LSQQTFANLWRLLAQN

SEQ ID NO: 714 - protein, 16 aa, Artificial Sequence
  Description of Artificial Sequence: Synthetic peptide
  MOD_RES (7)..(7): Alpha-Me R8-octenyl-alanine olefin amino acid connected by an all-carbon crosslinker comprising one double bond
  misc_feature (7)..(14): Crosslink between residues
  MOD_RES (14)..(14): Alpha-Me S5-pentenyl-alanine olefin amino acid connected by an all-carbon crosslinker comprising one double bond
QSQQTFANLWKLLAQN

SEQ ID NO: 715 - protein, 16 aa, Artificial Sequence
  Description of Artificial Sequence: Synthetic peptide
  MOD_RES (7)..(7): Alpha-Me R8-octenyl-alanine olefin amino acid connected by an all-carbon crosslinker comprising one double bond
  misc_feature (7)..(14): Crosslink between residues
  MOD_RES (14)..(14): Alpha-Me S5-pentenyl-alanine olefin amino acid connected by an all-carbon crosslinker comprising one double bond
QSQQTFANLWRLLAQN

SEQ ID NO: 716 - protein, 16 aa, Artificial Sequence
  Description of Artificial Sequence: Synthetic peptide
  MOD_RES (7)..(7): Alpha-Me R8-octenyl-alanine olefin amino acid connected by an all-carbon crosslinker comprising one double bond
  misc_feature (7)..(14): Crosslink between residues
  MOD_RES (14)..(14): Alpha-Me S5-pentenyl-alanine olefin amino acid connected by an all-carbon crosslinker comprising one double bond
QSQQTAANLWRLLAQN

SEQ ID NO: 717 - protein, 16 aa, Artificial Sequence
  Description of Artificial Sequence: Synthetic peptide
  MOD_RES (7)..(7): Alpha-Me R8-octenyl-alanine olefin amino acid connected by an all-carbon crosslinker comprising one double bond
  misc_feature (7)..(14): Crosslink between residues
  MOD_RES (14)..(14): Alpha-Me S5-pentenyl-alanine olefin amino acid connected by an all-carbon crosslinker comprising one double bond
QSQQTFANLWRKKAQN

SEQ ID NO: 718 - protein, 14 aa, Artificial Sequence
  Description of Artificial Sequence: Synthetic peptide
  MOD_RES (5)..(5): Alpha-Me R8-octenyl-alanine olefin amino acid connected by an all-carbon crosslinker comprising one double bond
  misc_feature (5)..(12): Crosslink between residues
  MOD_RES (12)..(12): Alpha-Me S5-pentenyl-alanine olefin amino acid connected by an all-carbon crosslinker comprising one double bond
QQTFADLWRLLAEN

SEQ ID NO: 719 - protein, 12 aa, Artificial Sequence
  Description of Artificial Sequence: Synthetic peptide
  MOD_RES (5)..(5): Alpha-Me R8-octenyl-alanine olefin amino acid connected by an all-carbon crosslinker comprising one double bond
  misc_feature (5)..(12): Crosslink between residues
  MOD_RES (12)..(12): Alpha-Me S5-pentenyl-alanine olefin amino acid connected by an all-carbon crosslinker comprising one double bond
QQTFADLWRLLA

SEQ ID NO: 720 - protein, 13 aa, Artificial Sequence
  Description of Artificial Sequence: Synthetic peptide
  MOD_RES (7)..(7): Alpha-Me S5-pentenyl-alanine olefin amino acid connected by an all-carbon crosslinker comprising one double bond
  misc_feature (7)..(11): Crosslink between residues
  MOD_RES (11)..(11): Alpha-Me S5-pentenyl-alanine olefin amino acid connected by an all-carbon crosslinker comprising one double bond
LSQQTFADLWALL

SEQ ID NO: 721 - protein, 11 aa, Artificial Sequence
  Description of Artificial Sequence: Synthetic peptide
  MOD_RES (5)..(5): Alpha-Me S5-pentenyl-alanine olefin amino acid connected by an all-carbon crosslinker comprising one double bond
  misc_feature (5)..(9): Crosslink between residues
  MOD_RES (9)..(9): Alpha-Me S5-pentenyl-alanine olefin amino acid connected by an all-carbon crosslinker comprising one double bond
QQTFADLWALL

SEQ ID NO: 722 - protein, 14 aa, Artificial Sequence
  Description of Artificial Sequence: Synthetic peptide
  MOD_RES (5)..(5): Alpha-Me R8-octenyl-alanine olefin amino acid connected by an all-carbon crosslinker comprising one double bond
  misc_feature (5)..(12): Crosslink between residues
  MOD_RES (12)..(12): Alpha-Me S5-pentenyl-alanine olefin amino acid connected by an all-carbon crosslinker comprising one double bond
QQTAADLWRLLAEN

SEQ ID NO: 723 - protein, 16 aa, Artificial Sequence
  Description of Artificial Sequence: Synthetic peptide
  MOD_RES (7)..(7): Alpha-Me R5-pentenyl-alanine olefin amino acid connected by an all-carbon crosslinker comprising one double bond
  misc_feature (7)..(14): Crosslink between residues
  MOD_RES (14)..(14): Alpha-Me S8-octenyl-alanine olefin amino acid connected by an all-carbon crosslinker comprising one double bond
QSQQTFANLWRLLAQN

SEQ ID NO: 724 - protein, 16 aa, Artificial Sequence
  Description of Artificial Sequence: Synthetic peptide
  MOD_RES (7)..(7): Alpha-Me R5-pentenyl-alanine olefin amino acid connected by an all-carbon crosslinker comprising one double bond
  misc_feature (7)..(14): Crosslink between residues
  MOD_RES (14)..(14): Alpha-Me S8-octenyl-alanine olefin amino acid connected by an all-carbon crosslinker comprising one double bond
QSQQTAANLWRLLAQN

SEQ ID NO: 725 - protein, 16 aa, Artificial Sequence
  Description of Artificial Sequence: Synthetic peptide
  MOD_RES (7)..(7): Alpha-Me R8-octenyl-alanine olefin amino acid connected by an all-carbon crosslinker comprising one double bond
  misc_feature (7)..(14): Crosslink between residues
  MOD_RES (14)..(14): Alpha-Me S5-pentenyl-alanine olefin amino acid connected by an all-carbon crosslinker comprising one double bond
QSQQTFADLWRLLAQN

SEQ ID NO: 726 - protein, 11 aa, Artificial Sequence
  Description of Artificial Sequence: Synthetic peptide
  MOD_RES (4)..(4): Alpha-Me R8-octenyl-alanine olefin amino acid connected by an all-carbon crosslinker comprising one double bond
  misc_feature (4)..(11): Crosslink between residues
  MOD_RES (11)..(11): Alpha-Me S5-pentenyl-alanine olefin amino acid connected by an all-carbon crosslinker comprising one double bond
QTFANLWRLLA

SEQ ID NO: 727 - protein, 16 aa, Artificial Sequence
  Description of Artificial Sequence: Synthetic peptide
  MOD_RES (7)..(7): Alpha-Me S5-pentenyl-alanine olefin amino acid connected by an all-carbon crosslinker comprising one double bond
  misc_feature (7)..(11): Crosslink between residues
  MOD_RES (11)..(11): Alpha-Me S5-pentenyl-alanine olefin amino acid connected by an all-carbon crosslinker comprising one double bond
QSQQTFANLWALLPQN

SEQ ID NO: 728 - protein, 16 aa, Artificial Sequence
  Description of Artificial Sequence: Synthetic peptide
  MOD_RES (3)..(3): Alpha-Me S5-pentenyl-alanine olefin amino acid connected by an all-carbon crosslinker comprising one double bond
  misc_feature (3)..(7): Crosslink between residues
  MOD_RES (7)..(7): Alpha-Me S5-pentenyl-alanine olefin amino acid connected by an all-carbon crosslinker comprising one double bond
QSAQTFANLWRLLPQN

SEQ ID NO: 729 - protein, 10 aa, Artificial Sequence
  Description of Artificial Sequence: Synthetic peptide
  MOD_RES (1)..(1): Alpha-Me S5-pentenyl-alanine olefin amino acid connected by an all-carbon crosslinker comprising one double bond
  misc_feature (1)..(5): Crosslink between residues
  MOD_RES (5)..(5): Alpha-Me S5-pentenyl-alanine olefin amino acid connected by an all-carbon crosslinker comprising one double bond
ATFSALWKLL

SEQ ID NO: 730 - protein, 10 aa, Artificial Sequence
  Description of Artificial Sequence: Synthetic peptide
  MOD_RES (4)..(4): Alpha-Me S5-pentenyl-alanine olefin amino acid connected by an all-carbon crosslinker comprising one double bond
  misc_feature (4)..(8): Crosslink between residues
  MOD_RES (8)..(8): Alpha-Me S5-pentenyl-alanine olefin amino acid connected by an all-carbon crosslinker comprising one double bond
ETFADLWALL

SEQ ID NO: 731 - protein, 10 aa, Artificial Sequence
  Description of Artificial Sequence: Synthetic peptide
  MOD_RES (4)..(4): Alpha-Me S5-pentenyl-alanine olefin amino acid connected by an all-carbon crosslinker comprising one double bond
  misc_feature (4)..(8): Crosslink between residues
  MOD_RES (8)..(8): Alpha-Me S5-pentenyl-alanine olefin amino acid connected by an all-carbon crosslinker comprising one double bond
QTFANLWALL

SEQ ID NO: 732 - protein, 13 aa, Artificial Sequence
  Description of Artificial Sequence: Synthetic peptide
  MOD_RES (1)..(1): Alpha-Me S5-pentenyl-alanine olefin amino acid connected by an all-carbon crosslinker comprising one double bond
  misc_feature (1)..(5): Crosslink between residues
  MOD_RES (5)..(5): Alpha-Me S5-pentenyl-alanine olefin amino acid connected by an all-carbon crosslinker comprising one double bond
ASQEAFSNLWKLL

SEQ ID NO: 733 - protein, 16 aa, Artificial Sequence
  Description of Artificial Sequence: Synthetic peptide
  N-term Ac
  MOD_RES (7)..(7): Alpha-Me R8-octenyl-alanine olefin amino acid connected by an all-carbon crosslinker comprising one double bond
  misc_feature (7)..(14): Crosslink between residues
  MOD_RES (14)..(14): Alpha-Me S5-pentenyl-alanine olefin amino acid connected by an all-carbon crosslinker comprising one double bond
  C-term NH2
LSQETFADLWKLLAEN

SEQ ID NO: 734 - protein, 16 aa, Artificial Sequence
  Description of Artificial Sequence: Synthetic peptide
  N-term Ac
  MOD_RES (7)..(7): Alpha-Me R8-octenyl-alanine olefin amino acid connected by an all-carbon crosslinker comprising one double bond
  misc_feature (7)..(14): Crosslink between residues
  MOD_RES (14)..(14): Alpha-Me S5-pentenyl-alanine olefin amino acid connected by an all-carbon crosslinker comprising one double bond
  C-term NH2
LSQETFANLWKLLAQN

SEQ ID NO: 735 - protein, 16 aa, Artificial Sequence
  Description of Artificial Sequence: Synthetic peptide
  N-term Ac
  MOD_RES (7)..(7): Alpha-Me R8-octenyl-alanine olefin amino acid connected by an all-carbon crosslinker comprising one double bond
  misc_feature (7)..(14): Crosslink between residues
  MOD_RES (14)..(14): Alpha-Me S5-pentenyl-alanine olefin amino acid connected by an all-carbon crosslinker comprising one double bond
  C-term NH2
LSQQTFANLWRLLAQN

SEQ ID NO: 736 - protein, 16 aa, Artificial Sequence
  Description of Artificial Sequence: Synthetic peptide
  N-term Ac
  MOD_RES (7)..(7): Alpha-Me R8-octenyl-alanine olefin amino acid connected by an all-carbon crosslinker comprising one double bond
  misc_feature (7)..(14): Crosslink between residues
  MOD_RES (14)..(14): Alpha-Me S5-pentenyl-alanine olefin amino acid connected by an all-carbon crosslinker comprising one double bond
  C-term NH2
QSQQTFANLWKLLAQN

SEQ ID NO: 737 - protein, 16 aa, Artificial Sequence
  Description of Artificial Sequence: Synthetic peptide
  N-term Ac
  MOD_RES (7)..(7): Alpha-Me R8-octenyl-alanine olefin amino acid connected by an all-carbon crosslinker comprising one double bond
  misc_feature (7)..(14): Crosslink between residues
  MOD_RES (14)..(14): Alpha-Me S5-pentenyl-alanine olefin amino acid connected by an all-carbon crosslinker comprising one double bond
  C-term NH2
QSQQTFANLWRLLAQN

SEQ ID NO: 738 - protein, 16 aa, Artificial Sequence
  Description of Artificial Sequence: Synthetic peptide
  N-term Ac
  MOD_RES (7)..(7): Alpha-Me R8-octenyl-alanine olefin amino acid connected by an all-carbon crosslinker comprising one double bond
  misc_feature (7)..(14): Crosslink between residues
  MOD_RES (14)..(14): Alpha-Me S5-pentenyl-alanine olefin amino acid connected by an all-carbon crosslinker comprising one double bond
  C-term NH2
QSQQTAANLWRLLAQN

SEQ ID NO: 739 - protein, 16 aa, Artificial Sequence
  Description of Artificial Sequence: Synthetic peptide
  N-term Ac
  MOD_RES (2)..(2): 2-aminoisobutyric acid
  MOD_RES (7)..(7): Alpha-Me R8-octenyl-alanine olefin amino acid connected by an all-carbon crosslinker comprising one double bond
  misc_feature (7)..(14): Crosslink between residues
  MOD_RES (14)..(14): Alpha-Me S5-pentenyl-alanine olefin amino acid connected by an all-carbon crosslinker comprising one double bond
  C-term NH2
QXQQTFANLWRLLAQN

SEQ ID NO: 740 - protein, 16 aa, Artificial Sequence
  Description of Artificial Sequence: Synthetic peptide
  N-term Ac
  C-term NH2
QSQQTFSNLWRLLPQN

SEQ ID NO: 741 - protein, 16 aa, Artificial Sequence
  Description of Artificial Sequence: Synthetic peptide
  N-term Ac
  MOD_RES (7)..(7): Alpha-Me R8-octenyl-alanine olefin amino acid that is not connected by a crosslinker
  MOD_RES (14)..(14): Alpha-Me S5-pentenyl-alanine olefin amino acid that is not connected by a crosslinker
  C-term NH2
QSQQTFANLWRLLAQN

SEQ ID NO: 742 - protein, 16 aa, Artificial Sequence
  Description of Artificial Sequence: Synthetic peptide
  N-term Ac
  MOD_RES (4)..(4): 2-aminoisobutyric acid
  MOD_RES (7)..(7): Alpha-Me R8-octenyl-alanine olefin amino acid connected by an all-carbon crosslinker comprising one double bond
  misc_feature (7)..(14): Crosslink between residues
  MOD_RES (14)..(14): Alpha-Me S5-pentenyl-alanine olefin amino acid connected by an all-carbon crosslinker comprising one double bond
  C-term NH2
QSQXTFANLWRLLAQN

SEQ ID NO: 743 - protein, 16 aa, Artificial Sequence
  Description of Artificial Sequence: Synthetic peptide
  N-term Ac
  MOD_RES (7)..(7): Alpha-Me R8-octenyl-alanine olefin amino acid connected by an all-carbon crosslinker comprising one double bond
  misc_feature (7)..(14): Crosslink between residues
  MOD_RES (14)..(14): Alpha-Me S5-pentenyl-alanine olefin amino acid connected by an all-carbon crosslinker comprising one double bond
  C-term NH2
QSQQTFANLWRLLAAN

SEQ ID NO: 744 - protein, 16 aa, Artificial Sequence
  Description of Artificial Sequence: Synthetic peptide
  N-term Ac
  MOD_RES (7)..(7): Alpha-Me R8-octenyl-alanine olefin amino acid connected by an all-carbon crosslinker comprising one double bond
  misc_feature (7)..(14): Crosslink between residues
  MOD_RES (14)..(14): Alpha-Me S5-pentenyl-alanine olefin amino acid connected by an all-carbon crosslinker comprising one double bond
  C-term NH2
ASQQTFANLWRLLAQN

SEQ ID NO: 745 - protein, 16 aa, Artificial Sequence
  Description of Artificial Sequence: Synthetic peptide
  N-term Ac
  MOD_RES (7)..(7): Alpha-Me R8-octenyl-alanine olefin amino acid connected by an all-carbon crosslinker comprising one double bond
  misc_feature (7)..(14): Crosslink between residues
  MOD_RES (14)..(14): Alpha-Me S5-pentenyl-alanine olefin amino acid connected by an all-carbon crosslinker comprising one double bond
  C-term NH2
QSQQTFAALWRLLAQN

SEQ ID NO: 746 - protein, 16 aa, Artificial Sequence
  Description of Artificial Sequence: Synthetic peptide
  N-term Ac
  MOD_RES (7)..(7): Alpha-Me R8-octenyl-alanine olefin amino acid connected by an all-carbon crosslinker comprising one double bond
  misc_feature (7)..(14): Crosslink between residues
  MOD_RES (14)..(14): Alpha-Me S5-pentenyl-alanine olefin amino acid connected by an all-carbon crosslinker comprising one double bond
  C-term NH2
QSQETFANLWRLLAQN

SEQ ID NO: 747 - protein, 16 aa, Artificial Sequence
  Description of Artificial Sequence: Synthetic peptide
  N-term Ac
  MOD_RES (7)..(7): Alpha-Me R8-octenyl-alanine olefin amino acid connected by an all-carbon crosslinker comprising one double bond
  misc_feature (7)..(14): Crosslink between residues
  MOD_RES (14)..(14): Alpha-Me S5-pentenyl-alanine olefin amino acid connected by an all-carbon crosslinker comprising one double bond
  C-term NH2
RSQQTFANLWRLLAQN

SEQ ID NO: 748 - protein, 16 aa, Artificial Sequence
  Description of Artificial Sequence: Synthetic peptide
  N-term Ac
  MOD_RES (7)..(7): Alpha-Me R8-octenyl-alanine olefin amino acid connected by an all-carbon crosslinker comprising one double bond
  misc_feature (7)..(14): Crosslink between residues
  MOD_RES (14)..(14): Alpha-Me S5-pentenyl-alanine olefin amino acid connected by an all-carbon crosslinker comprising one double bond
  C-term NH2
RSQQTFANLWRLLAEN

SEQ ID NO: 749 - protein, 16 aa, Artificial Sequence
  Description of Artificial Sequence: Synthetic peptide
  N-term Ac
  C-term NH2
LSQETFSDLWKLLPEN

SEQ ID NO: 750 - protein, 16 aa, Artificial Sequence
  Description of Artificial Sequence: Synthetic peptide
  N-term Ac
  MOD_RES (4)..(4): Alpha-Me S5-pentenyl-alanine olefin amino acid connected by an all-carbon crosslinker comprising one double bond
  misc_feature (4)..(8): Crosslink between residues
  MOD_RES (8)..(8): Alpha-Me S5-pentenyl-alanine olefin amino acid connected by an all-carbon crosslinker comprising one double bond
  C-term NH2
QSQATFSALWRLLPQN

SEQ ID NO: 751 - protein, 16 aa, Artificial Sequence
  Description of Artificial Sequence: Synthetic peptide
  N-term Ac
  MOD_RES (5)..(5): Alpha-Me S5-pentenyl-alanine olefin amino acid connected by an all-carbon crosslinker comprising one double bond
  misc_feature (5)..(9): Crosslink between residues
  MOD_RES (9)..(9): Alpha-Me S5-pentenyl-alanine olefin amino acid connected by an all-carbon crosslinker comprising one double bond
  C-term NH2
QSQQAFSNAWRLLPQN

SEQ ID NO: 752 - protein, 16 aa, Artificial Sequence
  Description of Artificial Sequence: Synthetic peptide
  N-term Ac
  MOD_RES (6)..(6): Alpha-Me S5-pentenyl-alanine olefin amino acid connected by an all-carbon crosslinker comprising one double bond
  misc_feature (6)..(10): Crosslink between residues
  MOD_RES (10)..(10): Alpha-Me S5-pentenyl-alanine olefin amino acid connected by an all-carbon crosslinker comprising one double bond
  C-term NH2
QSQQTASNLARLLPQN

SEQ ID NO: 753 - protein, 16 aa, Artificial Sequence
  Description of Artificial Sequence: Synthetic peptide
  N-term Ac
  MOD_RES (7)..(7): Alpha-Me S5-pentenyl-alanine olefin amino acid connected by an all-carbon crosslinker comprising one double bond
  misc_feature (7)..(11): Crosslink between residues
  MOD_RES (11)..(11): Alpha-Me S5-pentenyl-alanine olefin amino acid connected by an all-carbon crosslinker comprising one double bond
  C-term NH2
QSQQTFANLWALLPQN

SEQ ID NO: 754 - protein, 19 aa, Artificial Sequence
  Description of Artificial Sequence: Synthetic peptide
  N-term Ac
  MOD_RES (7)..(7): Alpha-Me R8-octenyl-alanine olefin amino acid connected by an all-carbon crosslinker comprising one double bond
  misc_feature (7)..(14): Crosslink between residues
  MOD_RES (11)..(11): 2-aminoisobutyric acid
  MOD_RES (13)..(13): Norleucine
  MOD_RES (14)..(14): Alpha-Me S5-pentenyl-alanine olefin amino acid connected by an all-carbon crosslinker comprising one double bond
  MOD_RES (17)..(17): 2-aminoisobutyric acid
  C-term NH2
RTQATFANQWXALATNXTR

SEQ ID NO: 755 - protein, 16 aa, Artificial Sequence
  Description of Artificial Sequence: Synthetic peptide
  N-term Ac
  MOD_RES (7)..(7): Alpha-Me R8-octenyl-alanine olefin amino acid connected by an all-carbon crosslinker comprising one double bond
  misc_feature (7)..(14): Crosslink between residues
  MOD_RES (14)..(14): Alpha-Me S5-pentenyl-alanine olefin amino acid connected by an all-carbon crosslinker comprising one double bond
  C-term NH2
QSQQTFANLWRLLARN

SEQ ID NO: 756 - protein, 16 aa, Artificial Sequence
  Description of Artificial Sequence: Synthetic peptide
  N-term Ac
  MOD_RES (7)..(7): Alpha-Me R8-octenyl-alanine olefin amino acid connected by an all-carbon crosslinker comprising one double bond
  misc_feature (7)..(14): Crosslink between residues
  MOD_RES (14)..(14): Alpha-Me S5-pentenyl-alanine olefin amino acid connected by an all-carbon crosslinker comprising one double bond
  C-term NH2
QSQRTFANLWRLLAQN

SEQ ID NO: 757 - protein, 16 aa, Artificial Sequence
  Description of Artificial Sequence: Synthetic peptide
  N-term Ac
  MOD_RES (7)..(7): Alpha-Me R8-octenyl-alanine olefin amino acid connected by an all-carbon crosslinker comprising one double bond
  misc_feature (7)..(14): Crosslink between residues
  MOD_RES (9)..(9): Norleucine
  MOD_RES (14)..(14): Alpha-Me S5-pentenyl-alanine olefin amino acid connected by an all-carbon crosslinker comprising one double bond
  C-term NH2
QSQQTFANLWRLLAQN

SEQ ID NO: 758 - protein, 16 aa, Artificial Sequence
  Description of Artificial Sequence: Synthetic peptide
  N-term Ac
  MOD_RES (7)..(7): Alpha-Me R8-octenyl-alanine olefin amino acid connected by an all-carbon crosslinker comprising one double bond
  misc_feature (7)..(14): Crosslink between residues
  MOD_RES (12)..(12): Norleucine
  MOD_RES (14)..(14): Alpha-Me S5-pentenyl-alanine olefin amino acid connected by an all-carbon crosslinker comprising one double bond
  C-term NH2
QSQQTFANLWRLLAQN

SEQ ID NO: 759 - protein, 16 aa, Artificial Sequence
  Description of Artificial Sequence: Synthetic peptide
  N-term Ac
  MOD_RES (7)..(7): Alpha-Me R8-octenyl-alanine olefin amino acid connected by an all-carbon crosslinker comprising one double bond
  misc_feature (7)..(14): Crosslink between residues
  MOD_RES (13)..(13): Norleucine
  MOD_RES (14)..(14): Alpha-Me S5-pentenyl-alanine olefin amino acid connected by an all-carbon crosslinker comprising one double bond
  C-term NH2
QSQQTFANLWRLLAQN

SEQ ID NO: 760 - protein, 16 aa, Artificial Sequence
  Description of Artificial Sequence: Synthetic peptide
  N-term Ac
  MOD_RES (7)..(7): Alpha-Me R8-octenyl-alanine olefin amino acid connected by an all-carbon crosslinker comprising one double bond
  misc_feature (7)..(14): Crosslink between residues
  MOD_RES (14)..(14): Alpha-Me S5-pentenyl-alanine olefin amino acid connected by an all-carbon crosslinker comprising one double bond
  C-term NH2
QSQQTYANLWRLLAQN

SEQ ID NO: 761 - protein, 16 aa, Artificial Sequence
  Description of Artificial Sequence: Synthetic peptide
  N-term Ac
  MOD_RES (2)..(2): 2-aminoisobutyric acid
  MOD_RES (7)..(7): Alpha-Me R8-octenyl-alanine olefin amino acid connected by an all-carbon crosslinker comprising one double bond
  misc_feature (7)..(14): Crosslink between residues
  MOD_RES (14)..(14): Alpha-Me S5-pentenyl-alanine olefin amino acid connected by an all-carbon crosslinker comprising one double bond
  C-term NH2
RXQQTFANLWRLLAQN

SEQ ID NO: 762 - protein, 12 aa, Artificial Sequence
  Description of Artificial Sequence: Synthetic peptide
  N-term Ac
  C-term NH2
MPRFMDYWEGLN

SEQ ID NO: 763 - protein, 16 aa, Artificial Sequence
  Description of Artificial Sequence: Synthetic peptide
  N-term Ac
  MOD_RES (7)..(7): Alpha-Me R8-octenyl-alanine olefin amino acid connected by an all-carbon crosslinker comprising one double bond
  misc_feature (7)..(14): Crosslink between residues
  MOD_RES (14)..(14): Alpha-Me S5-pentenyl-alanine olefin amino acid connected by an all-carbon crosslinker comprising one double bond
  C-term NH2
RSQQRFANLWRLLAQN

SEQ ID NO: 764 - protein, 16 aa, Artificial Sequence
  Description of Artificial Sequence: Synthetic peptide
  N-term Ac
  MOD_RES (7)..(7): Alpha-Me R8-octenyl-alanine olefin amino acid connected by an all-carbon crosslinker comprising one double bond
  misc_feature (7)..(14): Crosslink between residues
  MOD_RES (14)..(14): Alpha-Me S5-pentenyl-alanine olefin amino acid connected by an all-carbon crosslinker comprising one double bond
  C-term NH2
QSQQRFANLWRLLAQN

SEQ ID NO: 765 - protein, 16 aa, Artificial Sequence
  Description of Artificial Sequence: Synthetic peptide
  N-term Ac
  MOD_RES (2)..(2): 2-aminoisobutyric acid
  MOD_RES (7)..(7): Alpha-Me R8-octenyl-alanine olefin amino acid connected by an all-carbon crosslinker comprising one double bond
  misc_feature (7)..(14): Crosslink between residues
  MOD_RES (14)..(14): Alpha-Me S5-pentenyl-alanine olefin amino acid connected by an all-carbon crosslinker comprising one double bond
  C-term NH2
RXQQRFANLWRLLAQN

SEQ ID NO: 766 - protein, 16 aa, Artificial Sequence
  Description of Artificial Sequence: Synthetic peptide
  N-term Ac
  MOD_RES (7)..(7): Alpha-Me R8-octenyl-alanine olefin amino acid connected by an all-carbon crosslinker comprising one double bond
  misc_feature (7)..(14): Crosslink between residues
  MOD_RES (14)..(14): Alpha-Me S5-pentenyl-alanine olefin amino acid connected by an all-carbon crosslinker comprising one double bond
  C-term NH2
RSQQRFANFWRLLAQN

SEQ ID NO: 767 - protein, 16 aa, Artificial Sequence
  Description of Artificial Sequence: Synthetic peptide
  N-term Ac
  MOD_RES (7)..(7): Alpha-Me R8-octenyl-alanine olefin amino acid connected by an all-carbon crosslinker comprising one double bond
  misc_feature (7)..(14): Crosslink between residues
  MOD_RES (14)..(14): Alpha-Me S5-pentenyl-alanine olefin amino acid connected by an all-carbon crosslinker comprising one double bond
  C-term NH2
RSQQRFANYWRLLAQN

SEQ ID NO: 768 - protein, 16 aa, Artificial Sequence
  Description of Artificial Sequence: Synthetic peptide
  N-term Ac
  MOD_RES (7)..(7): Alpha-Me R8-octenyl-alanine olefin amino acid connected by an all-carbon crosslinker comprising one double bond
  misc_feature (7)..(14): Crosslink between residues
  MOD_RES (14)..(14): Alpha-Me S5-pentenyl-alanine olefin amino acid connected by an all-carbon crosslinker comprising one double bond
  C-term NH2
RSQQTFANLWQLLAQN

SEQ ID NO: 769 - protein, 16 aa, Artificial Sequence
  Description of Artificial Sequence: Synthetic peptide
  N-term Ac
  MOD_RES (7)..(7): Alpha-Me R8-octenyl-alanine olefin amino acid connected by an all-carbon crosslinker comprising one double bond
  misc_feature (7)..(14): Crosslink between residues
  MOD_RES (12)..(12): Alpha-Me-Leu
  MOD_RES (14)..(14): Alpha-Me S5-pentenyl-alanine olefin amino acid connected by an all-carbon crosslinker comprising one double bond
  C-term NH2
QSQQTFANLWQLLAQN

SEQ ID NO: 770 - protein, 16 aa, Artificial Sequence
  Description of Artificial Sequence: Synthetic peptide
  N-term Ac
  MOD_RES (7)..(7): Alpha-Me R8-octenyl-alanine olefin amino acid connected by an all-carbon crosslinker comprising one double bond
  misc_feature (7)..(14): Crosslink between residues
  MOD_RES (9)..(9): Alpha-Me-Leu
  MOD_RES (14)..(14): Alpha-Me S5-pentenyl-alanine olefin amino acid connected by an all-carbon crosslinker comprising one double bond
  C-term NH2
QSQQTFANLWRLLAQN

SEQ ID NO: 771 - protein, 14 aa, Artificial Sequence
  Description of Artificial Sequence: Synthetic peptide
  N-term Ac
  MOD_RES (1)..(1): Norleucine
  MOD_RES (5)..(5): Alpha-Me R8-octenyl-alanine olefin amino acid connected by an all-carbon crosslinker comprising one double bond
  misc_feature (5)..(12): Crosslink between residues
  MOD_RES (12)..(12): Alpha-Me S5-pentenyl-alanine olefin amino acid connected by an all-carbon crosslinker comprising one double bond
  C-term NH2
LPRFADYWEGLAQN

SEQ ID NO: 772 - protein, 14 aa, Artificial Sequence
  Description of Artificial Sequence: Synthetic peptide
  N-term Ac
  MOD_RES (1)..(1): Norleucine
  MOD_RES (5)..(5): Alpha-Me R8-octenyl-alanine olefin amino acid connected by an all-carbon crosslinker comprising one double bond
  misc_feature (5)..(12): Crosslink between residues
  MOD_RES (12)..(12): Alpha-Me S5-pentenyl-alanine olefin amino acid connected by an all-carbon crosslinker comprising one double bond
  C-term NH2
LPRFANYWRLLAQN

SEQ ID NO: 773 - protein, 11 aa, Artificial Sequence
  Description of Artificial Sequence: Synthetic peptide
  N-term Ac
  MOD_RES (3)..(3): Alpha-Me R8-octenyl-alanine olefin amino acid connected by an all-carbon crosslinker comprising one double bond
  misc_feature (3)..(10): Crosslink between residues
  MOD_RES (10)..(10): Alpha-Me S5-pentenyl-alanine olefin amino acid connected by an all-carbon crosslinker comprising one double bond
  C-term NH2
RFANLWRLLAQ

SEQ ID NO: 774 - protein, 16 aa, Artificial Sequence
  Description of Artificial Sequence: Synthetic peptide
  N-term Ac
  MOD_RES (7)..(7): Alpha-Me R8-octenyl-alanine olefin amino acid connected by an all-carbon crosslinker comprising one double bond
  misc_feature (7)..(14): Crosslink between residues
  MOD_RES (9)..(9): 2-fluoro-Phe
  MOD_RES (14)..(14): Alpha-Me S5-pentenyl-alanine olefin amino acid connected by an all-carbon crosslinker comprising one double bond
  C-term NH2
QSQQTFANFWRLLAQN

SEQ ID NO: 775 - protein, 16 aa, Artificial Sequence
  Description of Artificial Sequence: Synthetic peptide
  N-term Ac
  MOD_RES (7)..(7): Alpha-Me R8-octenyl-alanine olefin amino acid connected by an all-carbon crosslinker comprising one double bond
  misc_feature (7)..(14): Crosslink between residues
  MOD_RES (9)..(9): 3-fluoro-Phe
  MOD_RES (14)..(14): Alpha-Me S5-pentenyl-alanine olefin amino acid connected by an all-carbon crosslinker comprising one double bond
  C-term NH2
QSQQTFANFWRLLAQN

SEQ ID NO: 776 - protein, 16 aa, Artificial Sequence
  Description of Artificial Sequence: Synthetic peptide
  N-term Ac
  MOD_RES (7)..(7): Alpha-hydrogen R8-octenyl-alanine olefin amino acid connected by an all-carbon saturated crosslinker with no double bond
  misc_feature (7)..(14): Crosslink between residues
  MOD_RES (14)..(14): Alpha-hydrogen S5-pentenyl-alanine olefin amino acid connected by an all-carbon saturated crosslinker with no double bond
  C-term NH2
QSQQTFANLWRLLAQN

SEQ ID NO: 777 - protein, 16 aa, Artificial Sequence
  Description of Artificial Sequence: Synthetic peptide
  N-term Ac
  MOD_RES (7)..(7): Alpha-Me R8-octenyl-alanine olefin amino acid connected by an all-carbon crosslinker comprising one double bond
  misc_feature (7)..(14): Crosslink between residues
  MOD_RES (14)..(14): Alpha-Me S5-pentenyl-alanine olefin amino acid connected by an all-carbon crosslinker comprising one double bond
  C-term NH2
RSQQTAANLWRLLAQN

SEQ ID NO: 778 - protein, 16 aa, Artificial Sequence
  Description of Artificial Sequence: Synthetic peptide
  N-term Ac
  MOD_RES (7)..(7): Alpha-Me R8-octenyl-alanine olefin amino acid connected by an all-carbon crosslinker comprising no double bonds
  misc_feature (7)..(14): Crosslink between residues
  MOD_RES (14)..(14): Alpha-Me S5-pentenyl-alanine olefin amino acid connected by an all-carbon crosslinker comprising no double bonds
  C-term NH2
QSQQTFANLWRLLAQN

SEQ ID NO: 779 - protein, 16 aa, Artificial Sequence
  Description of Artificial Sequence: Synthetic peptide
  N-term acetylated with heptanoic acid and connected to internal olefin amino acid by an all-carbon crosslinker to position 4 comprising one double bond
  MOD_RES (4)..(4): Alpha-Me S5-pentenyl-alanine olefin amino acid connected by an all-carbon crosslinker to the N-term comprising one double bond
  C-term NH2
QSQATFSNLWRLLPQN

SEQ ID NO: 780 - protein, 16 aa, Artificial Sequence
  Description of Artificial Sequence: Synthetic peptide
  N-term acetylated with heptanoic acid and connected to internal olefin amino acid by an all-carbon crosslinker to position 4 comprising one double bond
  MOD_RES (4)..(4): Alpha-Me S5-pentenyl-alanine olefin amino acid connected by an all-carbon crosslinker to the N-term comprising one double bond
  MOD_RES (7)..(7): Alpha-Me R8-octenyl-alanine olefin amino acid connected by an all-carbon crosslinker comprising one double bond
  misc_feature (7)..(14): Crosslink between residues
  MOD_RES (14)..(14): Alpha-Me S5-pentenyl-alanine olefin amino acid connected by an all-carbon crosslinker comprising one double bond
  C-term NH2
QSQATFANLWRLLAQN

SEQ ID NO: 781 - protein, 16 aa, Artificial Sequence
  Description of Artificial Sequence: Synthetic peptide
  N-term Ac
  MOD_RES (7)..(7): Alpha-Me R8-octenyl-alanine olefin amino acid connected by an all-carbon crosslinker comprising one double bond
  misc_feature (7)..(14): Crosslink between residues
  MOD_RES (10)..(10): 6cl-Trp
  MOD_RES (14)..(14): Alpha-Me S5-pentenyl-alanine olefin amino acid connected by an all-carbon crosslinker comprising one double bond
  C-term NH2
QSQQTFANLWRLLAQN

SEQ ID NO: 782 - protein, 16 aa, Artificial Sequence
  Description of Artificial Sequence: Synthetic peptide
  N-term Ac
  MOD_RES (7)..(7): Alpha-Me R8-octenyl-alanine olefin amino acid connected by an all-carbon crosslinker comprising one double bond
  misc_feature (7)..(14): Crosslink between residues
  MOD_RES (10)..(10): Me6cl-Trp
  MOD_RES (14)..(14): Alpha-Me S5-pentenyl-alanine olefin amino acid connected by an all-carbon crosslinker comprising one double bond
  C-term NH2
QSQQTFANLWRLLAQN

SEQ ID NO: 783 - protein, 12 aa, Artificial Sequence
  Description of Artificial Sequence: Synthetic peptide
  N-term Ac
  C-term NH2
LTFEHYWAQLTS

SEQ ID NO: 784 - protein, 12 aa, Artificial Sequence
  Description of Artificial Sequence: Synthetic peptide
  N-term Ac
  MOD_RES (4)..(4): Alpha-Me S5-pentenyl-alanine olefin amino acid connected by an all-carbon crosslinker comprising one double bond
  misc_feature (4)..(8): Crosslink between residues
  MOD_RES (8)..(8): Alpha-Me S5-pentenyl-alanine olefin amino acid connected by an all-carbon crosslinker comprising one double bond
  C-term NH2
LTFAHYWAQLTS

SEQ ID NO: 785 - protein, 12 aa, Artificial Sequence
  Description of Artificial Sequence: Synthetic peptide
  N-term Ac
  MOD_RES (5)..(5): Alpha-Me S5-pentenyl-alanine olefin amino acid connected by an all-carbon crosslinker comprising one double bond
  misc_feature (5)..(9): Crosslink between residues
  MOD_RES (9)..(9): Alpha-Me S5-pentenyl-alanine olefin amino acid connected by an all-carbon crosslinker comprising one double bond
  C-term NH2
LTFEAYWAALTS

SEQ ID NO: 786 - protein, 12 aa, Artificial Sequence
  Description of Artificial Sequence: Synthetic peptide
  N-term Ac
  MOD_RES (4)..(4): Alpha-Me R8-octenyl-alanine olefin amino acid connected by an all-carbon crosslinker comprising one Z configured double bond
  misc_feature (4)..(11): Crosslink between residues
  MOD_RES (11)..(11): Alpha-Me S5-pentenyl-alanine olefin amino acid connected by an all-carbon crosslinker comprising one Z configured double bond
  C-term NH2
LTFAHYWAQLAS

SEQ ID NO: 787 - protein, 12 aa, Artificial Sequence
  Description of Artificial Sequence: Synthetic peptide
  N-term Ac
  MOD_RES (4)..(4): Alpha-Me R8-octenyl-alanine olefin amino acid connected by an all-carbon crosslinker comprising one double bond
  misc_feature (4)..(11): Crosslink between residues
  MOD_RES (11)..(11): Alpha-Me S5-pentenyl-alanine olefin amino acid connected by an all-carbon crosslinker comprising one double bond
  C-term NH2
LTFAHYWRQLAS

SEQ ID NO: 788 - protein, 16 aa, Artificial Sequence
  Description of Artificial Sequence: Synthetic peptide
  N-term Ac
  MOD_RES (3)..(3): Alpha-Me S5-pentenyl-alanine olefin amino acid connected by an all-carbon crosslinker comprising one double bond
  misc_feature (3)..(7): Crosslink between residues
  MOD_RES (7)..(7): Two pentenyl-alanine olefin side chains, each of which is crosslinked to another amino acid as indicated
  misc_feature (7)..(14): Crosslink between residues
  MOD_RES (14)..(14): Alpha-Me S8-octenyl-alanine olefin amino acid connected by an all-carbon crosslinker comprising one double bond
  C-term NH2
QSAQTFANLWRLLAQN

SEQ ID NO: 789 - protein, 16 aa, Artificial Sequence
  Description of Artificial Sequence: Synthetic peptide
  N-term Ac
  C-term NH2
QSQQTASNLWRLLPQN

SEQ ID NO: 790 - protein, 16 aa, Artificial Sequence
  Description of Artificial Sequence: Synthetic peptide
  N-term Ac
  MOD_RES (7)..(7): Alpha-Me R8-octenyl-alanine olefin amino acid that is not connected by a crosslinker
  MOD_RES (14)..(14): Alpha-Me S5-pentenyl-alanine olefin amino acid that is not connected by a crosslinker
  C-term NH2
QSQQTAANLWRLLAQN

SEQ ID NO: 791 - protein, 16 aa, Artificial Sequence
  Description of Artificial Sequence: Synthetic peptide
  N-term Ac
  MOD_RES (7)..(7): Alpha-Me R8-octenyl-alanine olefin amino acid that is not connected by a crosslinker
  MOD_RES (14)..(14): Alpha-Me S5-pentenyl-alanine olefin amino acid that is not connected by a crosslinker
  C-term NH2
ASQQTFANLWRLLAQN

SEQ ID NO: 792 - protein, 16 aa, Artificial Sequence
  Description of Artificial Sequence: Synthetic peptide
  N-term Ac
  MOD_RES (1)..(1): Alpha-Me S5-pentenyl-alanine olefin amino acid connected by an all-carbon crosslinker comprising one double bond
  misc_feature (1)..(5): Crosslink between residues
  MOD_RES (5)..(5): Alpha-Me S5-pentenyl-alanine olefin amino acid connected by an all-carbon crosslinker comprising one double bond
  MOD_RES (14)..(14): 2-aminoisobutyric acid
  C-term NH2
ASQQAFSNLWRLLXQN

SEQ ID NO: 793 - protein, 16 aa, Artificial Sequence
  Description of Artificial Sequence: Synthetic peptide
  N-term Ac
  MOD_RES (3)..(3): Alpha-Me S5-pentenyl-alanine olefin amino acid connected by an all-carbon crosslinker comprising one double bond
  misc_feature (3)..(7): Crosslink between residues
  MOD_RES (7)..(7): Alpha-Me S5-pentenyl-alanine olefin amino acid connected by an all-carbon crosslinker comprising one double bond
  MOD_RES (14)..(14): 2-aminoisobutyric acid
  C-term NH2
QSAQTFANLWRLLXQN

SEQ ID NO: 794 - protein, 16 aa, Artificial Sequence
  Description of Artificial Sequence: Synthetic peptide
  N-term Ac
  MOD_RES (5)..(5): Alpha-Me S5-pentenyl-alanine olefin amino acid connected by an all-carbon crosslinker comprising one double bond
  misc_feature (5)..(9): Crosslink between residues
  MOD_RES (9)..(9): Alpha-Me S5-pentenyl-alanine olefin amino acid connected by an all-carbon crosslinker comprising one double bond
  MOD_RES (14)..(14): 2-aminoisobutyric acid
  C-term NH2
QSQQAFSNAWRLLXQN

SEQ ID NO: 795 - protein, 16 aa, Artificial Sequence
  Description of Artificial Sequence: Synthetic peptide
  N-term Ac
  MOD_RES (7)..(7): Alpha-Me S5-pentenyl-alanine olefin amino acid connected by an all-carbon crosslinker comprising one double bond
  misc_feature (7)..(11): Crosslink between residues
  MOD_RES (11)..(11): Alpha-Me S5-pentenyl-alanine olefin amino acid connected by an all-carbon crosslinker comprising one double bond
  MOD_RES (14)..(14): 2-aminoisobutyric acid
  C-term NH2
QSQQTFANLWALLXQN

SEQ ID NO: 796 - protein, 16 aa, Artificial Sequence
  Description of Artificial Sequence: Synthetic peptide
  N-term Ac
  MOD_RES (8)..(8): Alpha-Me S5-pentenyl-alanine olefin amino acid connected by an all-carbon crosslinker comprising one double bond
  misc_feature (8)..(12): Crosslink between residues
  MOD_RES (12)..(12): Alpha-Me S5-pentenyl-alanine olefin amino acid connected by an all-carbon crosslinker comprising one double bond
  MOD_RES (14)..(14): 2-aminoisobutyric acid
  C-term NH2
QSQQTFSALWRALXQN

SEQ ID NO: 797 - protein, 16 aa, Artificial Sequence
  Description of Artificial Sequence: Synthetic peptide
  N-term Ac
  MOD_RES (11)..(11): Alpha-Me S5-pentenyl-alanine olefin amino acid connected by an all-carbon crosslinker comprising one double bond
  misc_feature (11)..(15): Crosslink between residues
  MOD_RES (15)..(15): Alpha-Me S5-pentenyl-alanine olefin amino acid connected by an all-carbon crosslinker comprising one double bond
  C-term NH2
QSQQTFSNLWALLAAN

SEQ ID NO: 798 - protein, 16 aa, Artificial Sequence
  Description of Artificial Sequence: Synthetic peptide
  N-term Ac
  MOD_RES (1)..(1): Alpha-Me S5-pentenyl-alanine olefin amino acid that is not connected by a crosslinker
  MOD_RES (5)..(5): Alpha-Me S5-pentenyl-alanine olefin amino acid that is not connected by a crosslinker
  MOD_RES (14)..(14): 2-aminoisobutyric acid
  C-term NH2
ASQQAFSNLWRLLXQN

SEQ ID NO: 799 - protein, 16 aa, Artificial Sequence
  Description of Artificial Sequence: Synthetic peptide
  N-term Ac
  MOD_RES (3)..(3): Alpha-Me S5-pentenyl-alanine olefin amino acid that is not connected by a crosslinker
  MOD_RES (7)..(7): Alpha-Me S5-pentenyl-alanine olefin amino acid that is not connected by a crosslinker
  MOD_RES (14)..(14): 2-aminoisobutyric acid
  C-term NH2
QSAQTFANLWRLLXQN

SEQ ID NO: 800 - protein, 16 aa, Artificial Sequence
  Description of Artificial Sequence: Synthetic peptide
  N-term Ac
  MOD_RES (5)..(5): Alpha-Me S5-pentenyl-alanine olefin amino acid that is not connected by a crosslinker
  MOD_RES (9)..(9): Alpha-Me S5-pentenyl-alanine olefin amino acid that is not connected by a crosslinker
  MOD_RES (14)..(14): 2-aminoisobutyric acid
  C-term NH2
QSQQAFSNAWRLLXQN

SEQ ID NO: 801 - protein, 16 aa, Artificial Sequence
  Description of Artificial Sequence: Synthetic peptide
  N-term Ac
  MOD_RES (7)..(7): Alpha-Me S5-pentenyl-alanine olefin amino acid that is not connected by a crosslinker
  MOD_RES (11)..(11): Alpha-Me S5-pentenyl-alanine olefin amino acid that is not connected by a crosslinker
  MOD_RES (14)..(14): 2-aminoisobutyric acid
  C-term NH2
QSQQTFANLWALLXQN

SEQ ID NO: 802 - protein, 16 aa, Artificial Sequence
  Description of Artificial Sequence: Synthetic peptide
  N-term Ac
  MOD_RES (4)..(4): Alpha-Me S5-pentenyl-alanine olefin amino acid connected by an all-carbon crosslinker comprising one double bond
  misc_feature (4)..(8): Crosslink between residues
  MOD_RES (8)..(8): Alpha-Me S5-pentenyl-alanine olefin amino acid connected by an all-carbon crosslinker comprising one double bond
  MOD_RES (14)..(14): 2-aminoisobutyric acid
  C-term NH2
QSQATFSALWRLLXQN

SEQ ID NO: 803 - protein, 16 aa, Artificial Sequence
  Description of Artificial Sequence: Synthetic peptide
  N-term Ac
  MOD_RES (4)..(4): Alpha-Me S5-pentenyl-alanine olefin amino acid that is not connected by a crosslinker
  MOD_RES (8)..(8): Alpha-Me S5-pentenyl-alanine olefin amino acid that is not connected by a crosslinker
  MOD_RES (14)..(14): 2-aminoisobutyric acid
  C-term NH2
QSQATFSALWRLLXQN

SEQ ID NO: 804 - protein, 16 aa, Artificial Sequence
  Description of Artificial Sequence: Synthetic peptide
  N-term Ac
  MOD_RES (3)..(3): Alpha-Me S5-pentenyl-alanine olefin amino acid not connected by any crosslinker
  MOD_RES (7)..(7): Amino acid comprising two pentenyl-alanine olefin side chains that are not crosslinked
  MOD_RES (14)..(14): Alpha-Me S8-octenyl-alanine olefin amino acid not connected by any crosslinker
  C-term NH2
QSAQTFANLWRLLAQN

SEQ ID NO: 805 - protein, 16 aa, Artificial Sequence
  Description of Artificial Sequence: Synthetic peptide
  N-term Ac
  MOD_RES (1)..(1): Alpha-Me R8-octenyl-alanine olefin amino acid connected by an all-carbon crosslinker comprising one double bond
  misc_feature (1)..(8): Crosslink between residues
  MOD_RES (8)..(8): Alpha-Me S5-pentenyl-alanine olefin amino acid connected by an all-carbon crosslinker comprising one double bond
  MOD_RES (14)..(14): 2-aminoisobutyric acid
  C-term NH2
ASQQTFSALWRLLXQN

SEQ ID NO: 806 - protein, 16 aa, Artificial Sequence
  Description of Artificial Sequence: Synthetic peptide
  N-term Ac
  MOD_RES (4)..(4): Alpha-Me R8-octenyl-alanine olefin amino acid connected by an all-carbon crosslinker comprising one double bond
  misc_feature (4)..(11): Crosslink between residues
  MOD_RES (11)..(11): Alpha-Me S5-pentenyl-alanine olefin amino acid connected by an all-carbon crosslinker comprising one double bond
  MOD_RES (14)..(14): 2-aminoisobutyric acid
  C-term NH2
QSQATFSNLWALLXQN

SEQ ID NO: 807 - protein, 16 aa, Artificial Sequence
  Description of Artificial Sequence: Synthetic peptide
  N-term Ac
  MOD_RES (8)..(8): Alpha-Me R8-octenyl-alanine olefin amino acid connected by an all-carbon crosslinker comprising one double bond
  misc_feature (8)..(15): Crosslink between residues
  MOD_RES (15)..(15): Alpha-Me S5-pentenyl-alanine olefin amino acid connected by an all-carbon crosslinker comprising one double bond
  C-term NH2
QSQQTFSALWRLLAAN

SEQ ID NO: 808 - protein, 16 aa, Artificial Sequence
  Description of Artificial Sequence: Synthetic peptide
  N-term Ac
  MOD_RES (3)..(3): Alpha-Me R5-pentenyl-alanine olefin amino acid connected by an all-carbon crosslinker comprising one double bond
  misc_feature (3)..(7): Crosslink between residues
  MOD_RES (7)..(7): Two pentenyl-alanine olefin side chains, each of which is crosslinked to another amino acid as indicated
  misc_feature (7)..(11): Crosslink between residues
  MOD_RES (11)..(11): Alpha-Me S5-pentenyl-alanine olefin amino acid connected by an all-carbon crosslinker comprising one double bond
  MOD_RES (14)..(14): 2-aminoisobutyric acid
  C-term NH2
QSAQTFANLWALLXQN

SEQ ID NO: 809 - protein, 16 aa, Artificial Sequence
  Description of Artificial Sequence: Synthetic peptide
  N-term Ac
  MOD_RES (1)..(1): Alpha-Me R8-octenyl-alanine olefin amino acid that is not connected by a crosslinker
  MOD_RES (8)..(8): Alpha-Me S5-pentenyl-alanine olefin amino acid that is not connected by a crosslinker
  MOD_RES (14)..(14): 2-aminoisobutyric acid
  C-term NH2
ASQQTFSALWRLLXQN

SEQ ID NO: 810 - protein, 16 aa, Artificial Sequence
  Description of Artificial Sequence: Synthetic peptide
  N-term Ac
  MOD_RES (4)..(4): Alpha-Me R8-octenyl-alanine olefin amino acid that is not connected by a crosslinker
  MOD_RES (11)..(11): Alpha-Me S5-pentenyl-alanine olefin amino acid that is not connected by a crosslinker
  MOD_RES (14)..(14): 2-aminoisobutyric acid
  C-term NH2
QSQATFSNLWALLXQN

SEQ ID NO: 811 - protein, 16 aa, Artificial Sequence
  Description of Artificial Sequence: Synthetic peptide
  N-term Ac
  MOD_RES (8)..(8): Alpha-Me R8-octenyl-alanine olefin amino acid that is not connected by a crosslinker
  MOD_RES (15)..(15): Alpha-Me S5-pentenyl-alanine olefin amino acid that is not connected by a crosslinker
  C-term NH2
QSQQTFSALWRLLAAN

SEQ ID NO: 812 - protein, 16 aa, Artificial Sequence
  Description of Artificial Sequence: Synthetic peptide
  N-term Ac
  MOD_RES (3)..(3): Alpha-Me R5-pentenyl-alanine olefin amino acid that is not connected by a crosslinker
  MOD_RES (7)..(7): Amino acid comprising two pentenyl-alanine olefin side chains that are not crosslinked
  MOD_RES (11)..(11): Alpha-Me S5-pentenyl-alanine olefin amino acid that is not connected by a crosslinker
  MOD_RES (14)..(14): 2-aminoisobutyric acid
  C-term NH2
QSAQTFANLWALLXQN

SEQ ID NO: 813 - protein, 16 aa, Artificial Sequence
  Description of Artificial Sequence: Synthetic peptide
  N-term Ac
  MOD_RES (14)..(14): 2-aminoisobutyric acid
  C-term NH2
QSQQTFSNLWRLLXQN

SEQ ID NO: 814 - protein, 16 aa, Artificial Sequence
  Description of Artificial Sequence: Synthetic peptide
  N-term acetylated with heptanoic acid
  MOD_RES (4)..(4): Alpha-Me S5-pentenyl-alanine olefin amino acid that is not connected by a crosslinker
  MOD_RES (7)..(7): Alpha-Me R8-octenyl-alanine olefin amino acid that is not connected by a crosslinker
  MOD_RES (14)..(14): Alpha-Me S5-pentenyl-alanine olefin amino acid that is not connected by a crosslinker
  C-term NH2
QSQATFANLWRLLAQN

SEQ ID NO: 815 - protein, 16 aa, Artificial Sequence
  Description of Artificial Sequence: Synthetic peptide
  N-term Ac
  MOD_RES (7)..(7): Alpha-Me R8-octenyl-alanine olefin amino acid connected by an all-carbon crosslinker comprising one double bond
  misc_feature (7)..(14): Crosslink between residues
  MOD_RES (14)..(14): Alpha-Me S5-pentenyl-alanine olefin amino acid connected by an all-carbon crosslinker comprising one double bond
  C-term NH2
ASQQTFANLRWLLAQN

SEQ ID NO: 816 - protein, 15 aa, Artificial Sequence
  Description of Artificial Sequence: Synthetic peptide
  N-term Ac
  MOD_RES (7)..(7): Alpha-Me R8-octenyl-alanine olefin amino acid that is not connected by a crosslinker
  MOD_RES (14)..(14): Alpha-Me S5-pentenyl-alanine olefin amino acid that is not connected by a crosslinker
  C-term NH2
QSQQTFANLWRLLAQ

SEQ ID NO: 817 - protein, 15 aa, Artificial Sequence
  Description of Artificial Sequence: Synthetic peptide
  N-term Ac
  MOD_RES (7)..(7): Alpha-Me R8-octenyl-alanine olefin amino acid connected by an all-carbon crosslinker comprising one double bond
  misc_feature (7)..(14): Crosslink between residues
  MOD_RES (14)..(14): Alpha-Me S5-pentenyl-alanine olefin amino acid connected by an all-carbon crosslinker comprising one double bond
  C-term NH2
QSQQTFANLWRLLAQ

SEQ ID NO: 818 - protein, 16 aa, Artificial Sequence
  Description of Artificial Sequence: Synthetic peptide
  N-term Ac
  MOD_RES (7)..(7): Alpha-Me R8-octenyl-alanine olefin amino acid connected by an all-carbon crosslinker comprising one double bond
  misc_feature (7)..(14): Crosslink between residues
  MOD_RES (14)..(14): Alpha-Me S5-pentenyl-alanine olefin amino acid connected by an all-carbon crosslinker comprising one double bond
  C-term NH2
AAARAAAAAARAAAAA

SEQ ID NO: 819 - protein, 13 aa, Artificial Sequence
  Description of Artificial Sequence: Synthetic peptide
  N-term Ac
  C-term NH2
LTFEHYWAQLTSA

SEQ ID NO: 820 - protein, 13 aa, Artificial Sequence
  Description of Artificial Sequence: Synthetic peptide
  N-term Ac
  MOD_RES (4)..(4): Alpha-Me R8-octenyl-alanine olefin amino acid connected by an all-carbon crosslinker comprising one double bond
  misc_feature (4)..(11): Crosslink between residues
  MOD_RES (11)..(11): Alpha-Me S5-pentenyl-alanine olefin amino acid connected by an all-carbon crosslinker comprising one double bond
  C-term NH2
LTFAHYWAQLASA

SEQ ID NO: 821 - protein, 16 aa, Artificial Sequence
  Description of Artificial Sequence: Synthetic peptide
  N-term Ac
  C-term NH2
ASQQTFSNLWRLLPQN

SEQ ID NO: 822 - protein, 16 aa, Artificial Sequence
  Description of Artificial Sequence: Synthetic peptide
  N-term Ac
  MOD_RES (3)..(3): Alpha-Me S5-pentenyl-alanine olefin amino acid connected by an all-carbon crosslinker comprising one double bond
  misc_feature (3)..(7): Crosslink between residues
  MOD_RES (7)..(7): Two pentenyl-alanine olefin side chains, each of which is crosslinked to another amino acid as indicated
  misc_feature (7)..(11): Crosslink between residues
  MOD_RES (11)..(11): Alpha-Me R5-pentenyl-alanine olefin amino acid connected by an all-carbon crosslinker comprising one double bond
  MOD_RES (14)..(14): 2-aminoisobutyric acid
  C-term NH2
QSAQTFANLWALLXQN

SEQ ID NO: 823 - protein, 16 aa, Artificial Sequence
  Description of Artificial Sequence: Synthetic peptide
  N-term Ac
  MOD_RES (7)..(7): 2-aminoisobutyric acid
  MOD_RES (14)..(14): 2-aminoisobutyric acid
  C-term NH2
QSQQTFXNLWRLLXQN

SEQ ID NO: 824 - protein, 16 aa, Artificial Sequence
  Description of Artificial Sequence: Synthetic peptide
  N-term Ac
  MOD_RES (7)..(7): Norleucine
  MOD_RES (14)..(14): Norleucine
  C-term NH2
QSQQTFLNLWRLLLQN

SEQ ID NO: 825 - protein, 16 aa, Artificial Sequence
  Description of Artificial Sequence: Synthetic peptide
  N-term Ac
  MOD_RES (7)..(7): Alpha-Me R8-octenyl-alanine olefin amino acid that is not connected by a crosslinker
  MOD_RES (14)..(14): 2-aminoisobutyric acid
  C-term NH2
QSQQTFANLWRLLXQN

SEQ ID NO: 826 - protein, 16 aa, Artificial Sequence
  Description of Artificial Sequence: Synthetic peptide
  N-term Ac
  MOD_RES (7)..(7): Alpha-Me R8-octenyl-alanine olefin amino acid that is not connected by a crosslinker
  MOD_RES (14)..(14): Norleucine
  C-term NH2
QSQQTFANLWRLLLQN

SEQ ID NO: 827 - protein, 16 aa, Artificial Sequence
  Description of Artificial Sequence: Synthetic peptide
  N-term Ac
  MOD_RES (7)..(7): 2-aminoisobutyric acid
  MOD_RES (14)..(14): Alpha-Me S5-pentenyl-alanine olefin amino acid that is not connected by a crosslinker
  C-term NH2
QSQQTFXNLWRLLAQN

SEQ ID NO: 828 - protein, 16 aa, Artificial Sequence
  Description of Artificial Sequence: Synthetic peptide
  N-term Ac
  MOD_RES (7)..(7): Norleucine
  MOD_RES (14)..(14): Alpha-Me S5-pentenyl-alanine olefin amino acid that is not connected by a crosslinker
  C-term NH2
QSQQTFLNLWRLLAQN

SEQ ID NO: 829 - protein, 16 aa, Artificial Sequence
  Description of Artificial Sequence: Synthetic peptide
  N-term Ac
  MOD_RES (7)..(7): Alpha-Me R8-octenyl-alanine olefin amino acid connected by an all-carbon crosslinker comprising no double bonds
  misc_feature (7)..(14): Crosslink between residues
  MOD_RES (10)..(10): 6cl-Trp
  MOD_RES (12)..(12): Norleucine
  MOD_RES (14)..(14): Alpha-Me S5-pentenyl-alanine olefin amino acid connected by an all-carbon crosslinker comprising no double bonds
  C-term NH2
QSQQTFANLWRLLAQN

SEQ ID NO: 830 - protein, 16 aa, Artificial Sequence
  Description of Artificial Sequence: Synthetic peptide
  N-term Ac
  MOD_RES (7)..(7): Alpha-Me R8-octenyl-alanine olefin amino acid connected by an all-carbon crosslinker comprising no double bonds
  misc_feature (7)..(3): Crosslink between residues
  MOD_RES (10)..(10): Me6clW
  MOD_RES (14)..(14): Alpha-Me S5-pentenyl-alanine olefin amino acid connected by an all-carbon crosslinker comprising no double bonds
  C-term NH2
QSQQTFANLWRLLAQN

SEQ ID NO: 831 - protein, 8 aa, Artificial Sequence
  Description of Artificial Sequence: Synthetic peptide
  N-term Ac
  MOD_RES (2)..(2): Norleucine
  MOD_RES (3)..(3): Alpha-Me S5-pentenyl-alanine olefin amino acid connected by an all-carbon crosslinker comprising one double bond
  misc_feature (3)..(7): Crosslink between residues
  MOD_RES (7)..(7): Alpha-Me S5-pentenyl-alanine olefin amino acid connected by an all-carbon crosslinker comprising one double bond
  C-term NH2
FLAYWEAL

SEQ ID NO: 832 - protein, 10 aa, Artificial Sequence
  Description of Artificial Sequence: Synthetic peptide
  N-term Ac
  MOD_RES (2)..(2): Alpha-Me R8-octenyl-alanine olefin amino acid connected by an all-carbon crosslinker comprising one double bond
  misc_feature (2)..(9): Crosslink between residues
  MOD_RES (9)..(9): Alpha-Me S5-pentenyl-alanine olefin amino acid connected by an all-carbon crosslinker comprising one double bond
  C-term NH2
FAAYWELLAA

SEQ ID NO: 833 - protein, 10 aa, Artificial Sequence
  Description of Artificial Sequence: Synthetic peptide
  N-term Ac
  MOD_RES (2)..(2): Alpha-Me R8-octenyl-alanine olefin amino acid connected by an all-carbon crosslinker comprising one double bond
  misc_feature (2)..(9): Crosslink between residues
  MOD_RES (9)..(9): Alpha-Me S5-pentenyl-alanine olefin amino acid connected by an all-carbon crosslinker comprising one double bond
  C-term NH2
FAAYWQLLAA

SEQ ID NO: 834 - protein, 14 aa, Artificial Sequence
  Description of Artificial Sequence: Synthetic peptide
  N-term Ac
  MOD_RES (1)..(1): Norleucine
  MOD_RES (5)..(5): Alpha-Me R8-octenyl-alanine olefin amino acid connected by an all-carbon crosslinker comprising one double bond
  misc_feature (5)..(12): Crosslink between residues
  MOD_RES (12)..(12): Alpha-Me S5-pentenyl-alanine olefin amino acid connected by an all-carbon crosslinker comprising one double bond
  C-term NH2
LPRFANYWELLAQN

SEQ ID NO: 835 - protein, 14 aa, Artificial Sequence
  Description of Artificial Sequence: Synthetic peptide
  N-term Ac
  MOD_RES (1)..(1): Norleucine
  MOD_RES (5)..(5): Alpha-Me R8-octenyl-alanine olefin amino acid connected by an all-carbon crosslinker comprising one double bond
  misc_feature (5)..(12): Crosslink between residues
  MOD_RES (12)..(12): Alpha-Me S5-pentenyl-alanine olefin amino acid connected by an all-carbon crosslinker comprising one double bond
  C-term NH2
LPRFADYWRLLAQN

SEQ ID NO: 836 - protein, 13 aa, Artificial Sequence
  Description of Artificial Sequence: Synthetic peptide
  N-term Ac
  MOD_RES (1)..(1): Norleucine
  MOD_RES (5)..(5): Alpha-Me R8-octenyl-alanine olefin amino acid connected by an all-carbon crosslinker comprising one double bond
  misc_feature (5)..(12): Crosslink between residues
  MOD_RES (12)..(12): Alpha-Me S5-pentenyl-alanine olefin amino acid connected by an all-carbon crosslinker comprising one double bond
  C-term NH2
LPRFANYWRLLAQ

SEQ ID NO: 837 - protein, 12 aa, Artificial Sequence
  Description of Artificial Sequence: Synthetic peptide
  N-term Ac
  MOD_RES (1)..(1): Norleucine
  MOD_RES (5)..(5): Alpha-Me R8-octenyl-alanine olefin amino acid connected by an all-carbon crosslinker comprising one double bond
  misc_feature (5)..(12): Crosslink between residues
  MOD_RES (12)..(12): Alpha-Me S5-pentenyl-alanine olefin amino acid connected by an all-carbon crosslinker comprising one double bond
  C-term NH2
LPRFANYWRLLA

SEQ ID NO: 838 - protein, 16 aa, Artificial Sequence
  Description of Artificial Sequence: Synthetic peptide
  N-term Ac
  MOD_RES (7)..(7): Alpha-Me R8-octenyl-alanine olefin amino acid connected by an all-carbon crosslinker comprising one double bond
  misc_feature (7)..(14): Crosslink between residues
  MOD_RES (14)..(14): Alpha-Me S5-pentenyl-alanine olefin amino acid connected by an all-carbon crosslinker comprising one double bond
  C-term NH2
QSQQTFADLWRLLAQN

SEQ ID NO: 839 - protein, 16 aa, Artificial Sequence
  Description of Artificial Sequence: Synthetic peptide
  N-term Ac
  MOD_RES (7)..(7): Alpha-Me R8-octenyl-alanine olefin amino acid connected by an all-carbon crosslinker comprising one double bond
  misc_feature (7)..(14): Crosslink between residues
  MOD_RES (14)..(14): Alpha-Me S5-pentenyl-alanine olefin amino acid connected by an all-carbon crosslinker comprising one double bond
  C-term NH2
QSQQTFANLWRLLAEN

SEQ ID NO: 840 - protein, 16 aa, Artificial Sequence
  Description of Artificial Sequence: Synthetic peptide
  N-term Ac
  MOD_RES (7)..(7): Alpha-Me R8-octenyl-alanine olefin amino acid connected by an all-carbon crosslinker comprising one double bond
  misc_feature (7)..(14): Crosslink between residues
  MOD_RES (14)..(14): Alpha-Me S5-pentenyl-alanine olefin amino acid connected by an all-carbon crosslinker comprising one double bond
  C-term NH2
QSQQTFANLWRLLAQD

SEQ ID NO: 841 - protein, 15 aa, Artificial Sequence
  Description of Artificial Sequence: Synthetic peptide
  N-term Ac
  MOD_RES (7)..(7): Alpha-Me R8-octenyl-alanine olefin amino acid connected by an all-carbon crosslinker comprising one double bond
  misc_feature (7)..(14): Crosslink between residues
  MOD_RES (14)..(14): Alpha-Me S5-pentenyl-alanine olefin amino acid connected by an all-carbon crosslinker comprising one double bond
  C-term NH2
QSQQTFANLWRLLAS

SEQ ID NO: 842 - protein, 16 aa, Artificial Sequence
  Description of Artificial Sequence: Synthetic peptide
  N-term Ac
  MOD_RES (7)..(7): Alpha-Me R8-octenyl-alanine olefin amino acid connected by an all-carbon crosslinker comprising one double bond
  misc_feature (7)..(14): Crosslink between residues
  MOD_RES (14)..(14): Alpha-Me S5-pentenyl-alanine olefin amino acid connected by an all-carbon crosslinker comprising one double bond
  C-term NH2
ESQQTFANLWRLLAQN

SEQ ID NO: 843 - protein, 12 aa, Artificial Sequence
  Description of Artificial Sequence: Synthetic peptide
  N-term Ac
  MOD_RES (4)..(4): Alpha-Me R8-octenyl-alanine olefin amino acid connected by an all-carbon crosslinker comprising one double bond
  misc_feature (4)..(11): Crosslink between residues
  MOD_RES (9)..(9): Norleucine
  MOD_RES (11)..(11): Alpha-Me S5-pentenyl-alanine olefin amino acid connected by an all-carbon crosslinker comprising one double bond
  C-term NH2
LTFANLWRLLAQ

SEQ ID NO: 844 - protein, 12 aa, Artificial Sequence
  Description of Artificial Sequence: Synthetic peptide
  N-term Ac
  MOD_RES (4)..(4): Alpha-Me R8-octenyl-alanine olefin amino acid connected by an all-carbon crosslinker comprising one double bond
  misc_feature (4)..(11): Crosslink between residues
  MOD_RES (9)..(9): Norleucine
  MOD_RES (11)..(11): Alpha-Me S5-pentenyl-alanine olefin amino acid connected by an all-carbon crosslinker comprising one double bond
  C-term NH2
LRFANLWRLLAQ

SEQ ID NO: 845 - protein, 16 aa, Artificial Sequence
  Description of Artificial Sequence: Synthetic peptide
  N-term Ac
  MOD_RES (7)..(7): Alpha-Me R8-octenyl-alanine olefin amino acid connected by an all-carbon crosslinker comprising one double bond
  misc_feature (7)..(14): Crosslink between residues
  MOD_RES (12)..(12): Norleucine
  MOD_RES (14)..(14): Alpha-Me S5-pentenyl-alanine olefin amino acid connected by an all-carbon crosslinker comprising one double bond
  C-term NH2
QSQQTFANWWRLLAQN

SEQ ID NO: 846 - protein, 15 aa, Artificial Sequence
  Description of Artificial Sequence: Synthetic peptide
  N-term Ac
  MOD_RES (7)..(7): Alpha-Me R8-octenyl-alanine olefin amino acid connected by an all-carbon crosslinker comprising one double bond
  misc_feature (7)..(14): Crosslink between residues
  MOD_RES (12)..(12): Norleucine
  MOD_RES (14)..(14): Alpha-Me S5-pentenyl-alanine olefin amino acid connected by an all-carbon crosslinker comprising one double bond
  C-term NH2
QSQQTFANLWRLLAQ

SEQ ID NO: 847 - protein, 13 aa, Artificial Sequence
  Description of Artificial Sequence: Synthetic peptide
  N-term Ac
  MOD_RES (4)..(4): Alpha-Me R8-octenyl-alanine olefin amino acid connected by an all-carbon crosslinker comprising one double bond
  misc_feature (4)..(11): Crosslink between residues
  MOD_RES (9)..(9): Norleucine
  MOD_RES (11)..(11): Alpha-Me S5-pentenyl-alanine olefin amino acid connected by an all-carbon crosslinker comprising one double bond
  C-term NH2
QTFANLWRLLAQN

SEQ ID NO: 848 - protein, 14 aa, Artificial Sequence
  Description of Artificial Sequence: Synthetic peptide
  N-term Ac
  MOD_RES (1)..(1): Norleucine
  MOD_RES (5)..(5): Alpha-Me R8-octenyl-alanine olefin amino acid connected by an all-carbon crosslinker comprising one double bond
  misc_feature (5)..(12): Crosslink between residues
  MOD_RES (12)..(12): Alpha-Me S5-pentenyl-alanine olefin amino acid connected by an all-carbon crosslinker comprising one double bond
  C-term NH2
LPRFANWWRLLAQN

SEQ ID NO: 849 - protein, 13 aa, Artificial Sequence
  Description of Artificial Sequence: Synthetic peptide
  N-term Ac
  MOD_RES (1)..(1): Norleucine
  MOD_RES (5)..(5): Alpha-Me R8-octenyl-alanine olefin amino acid connected by an all-carbon crosslinker comprising one double bond
  misc_feature (5)..(12): Crosslink between residues
  MOD_RES (12)..(12): Alpha-Me S5-pentenyl-alanine olefin amino acid connected by an all-carbon crosslinker comprising one double bond
  C-term NH2
LPRFANWWRLLAA

SEQ ID NO: 850 - protein, 10 aa, Artificial Sequence
  Description of Artificial Sequence: Synthetic peptide
  N-term Ac
  C-term NH2
TSFAEYWNLL

SEQ ID NO: 851 - protein, 12 aa, Artificial Sequence
  Description of Artificial Sequence: Synthetic peptide
  N-term Ac
  MOD_RES (4)..(4): Alpha-Me R8-octenyl-alanine olefin amino acid connected by an all-carbon crosslinker comprising one double bond
  misc_feature (4)..(11): Crosslink between residues
  MOD_RES (11)..(11): Alpha-Me S5-pentenyl-alanine olefin amino acid connected by an all-carbon crosslinker comprising one double bond
  C-term NH2
QTFAHWWSQLAS

SEQ ID NO: 852 - protein, 8 aa, Artificial Sequence
  Description of Artificial Sequence: Synthetic peptide
  N-term Ac
  MOD_RES (3)..(3): Alpha-Me S5-pentenyl-alanine olefin amino acid connected by an all-carbon crosslinker comprising one double bond
  misc_feature (3)..(7): Crosslink between residues
  MOD_RES (7)..(7): Alpha-Me S5-pentenyl-alanine olefin amino acid connected by an all-carbon crosslinker comprising one double bond
  C-term NH2
FMAYWEAL

SEQ ID NO: 853 - protein, 12 aa, Artificial Sequence
  Description of Artificial Sequence: Synthetic peptide
  N-term Ac
  C-term NH2
QTFEHWWSQLLS

SEQ ID NO: 854 - protein, 16 aa, Artificial Sequence
  Description of Artificial Sequence: Synthetic peptide
  N-term Ac
  MOD_RES (7)..(7): Alpha-Me R8-octenyl-alanine olefin amino acid connected by an all-carbon crosslinker comprising one double bond
  misc_feature (7)..(14): Crosslink between residues
  MOD_RES (10)..(10): Alpha-Me-Trp
  MOD_RES (13)..(13): Norleucine
  MOD_RES (14)..(14): Alpha-Me S5-pentenyl-alanine olefin amino acid connected by an all-carbon crosslinker comprising one double bond
  C-term NH2
QSQQTFANLWRLLAQN

SEQ ID NO: 855 - protein, 8 aa, Artificial Sequence
  Description of Artificial Sequence: Synthetic peptide
  N-term Ac
  MOD_RES (3)..(3): 2-aminoisobutyric acid
  MOD_RES (5)..(5): 6cl-Trp
  MOD_RES (7)..(7): Ac3c
  C-term NH2
FMXYWEXL

SEQ ID NO: 856 - protein, 8 aa, Artificial Sequence
  Description of Artificial Sequence: Synthetic peptide
  N-term Ac
  MOD_RES (2)..(2): Norleucine
  MOD_RES (3)..(3): Alpha-Me S5-pentenyl-alanine olefin amino acid connected by an all-carbon crosslinker comprising one double bond
  misc_feature (3)..(7): Crosslink between residues
  MOD_RES (5)..(5): 6cl-Trp
  MOD_RES (7)..(7): Alpha-Me S5-pentenyl-alanine olefin amino acid connected by an all-carbon crosslinker comprising one double bond
  C-term NH2
FLAYWEAL

SEQ ID NO: 857 - protein, 9 aa, Artificial Sequence
  Description of Artificial Sequence: Synthetic peptide
  N-term Ac
  MOD_RES (2)..(2): Alpha-Me R8-octenyl-alanine olefin amino acid connected by an all-carbon crosslinker comprising one Z configured double bond
  misc_feature (2)..(9): Crosslink between residues
  MOD_RES (5)..(5): 6cl-Trp
  MOD_RES (7)..(7): Ac3c
  MOD_RES (9)..(9): Alpha-Me S5-pentenyl-alanine olefin amino acid connected by an all-carbon crosslinker comprising one Z configured double bond
  C-term NH2
FAAYWEXLA

SEQ ID NO: 858 - protein, 10 aa, Artificial Sequence
  Description of Artificial Sequence: Synthetic peptide
  N-term Ac
  MOD_RES (2)..(2): Alpha-Me R8-octenyl-alanine olefin amino acid connected by an all-carbon crosslinker comprising one double bond
  misc_feature (2)..(9): Crosslink between residues
  MOD_RES (5)..(5): 6cl-Trp
  MOD_RES (7)..(7): Ac3c
  MOD_RES (9)..(9): Alpha-Me S5-pentenyl-alanine olefin amino acid connected by an all-carbon crosslinker comprising one double bond
  C-term NH2
FAAYWEXLAA

SEQ ID NO: 859 - protein, 14 aa, Artificial Sequence
  Description of Artificial Sequence: Synthetic peptide
  N-term Ac
  MOD_RES (1)..(1): Norleucine
  MOD_RES (5)..(5): Alpha-Me R8-octenyl-alanine olefin amino acid connected by an all-carbon crosslinker comprising one double bond
  misc_feature (5)..(12): Crosslink between residues
  MOD_RES (8)..(8): 6cl-Trp
  MOD_RES (12)..(12): Alpha-Me S5-pentenyl-alanine olefin amino acid connected by an all-carbon crosslinker comprising one double bond
  C-term NH2
LPRFANYWRLLAQN

SEQ ID NO: 860 - protein, 11 aa, Artificial Sequence
  Description of Artificial Sequence: Synthetic peptide
  N-term Ac
  MOD_RES (3)..(3): Alpha-Me R8-octenyl-alanine olefin amino acid connected by an all-carbon crosslinker comprising one double bond
  misc_feature (3)..(10): Crosslink between residues
  MOD_RES (10)..(10): Alpha-Me S5-pentenyl-alanine olefin amino acid connected by an all-carbon crosslinker comprising one double bond
  C-term NH2
AFAAAWALAAA

SEQ ID NO: 861 - protein, 11 aa, Artificial Sequence
  Description of Artificial Sequence: Synthetic peptide
  MOD_RES (3)..(3): Alpha-Me R8-octenyl-alanine olefin amino acid connected by an all-carbon crosslinker comprising one double bond
  misc_feature (3)..(10): Crosslink between residues
  MOD_RES (10)..(10): Alpha-Me S5-pentenyl-alanine olefin amino acid connected by an all-carbon crosslinker comprising one double bond
  C-term NH2
TFAAAWRLAAQ

SEQ ID NO: 862 - protein, 11 aa, Artificial Sequence
  Description of Artificial Sequence: Synthetic peptide
  N-term Pr
  MOD_RES (3)..(3): Alpha-Me R8-octenyl-alanine olefin amino acid connected by an all-carbon crosslinker comprising one double bond
  misc_feature (3)..(10): Crosslink between residues
  MOD_RES (10)..(10): Alpha-Me S5-pentenyl-alanine olefin amino acid connected by an all-carbon crosslinker comprising one double bond
  C-term NH2
TFAAAWRLAAQ

SEQ ID NO: 863 - protein, 16 aa, Artificial Sequence
  Description of Artificial Sequence: Synthetic peptide
  N-term Ac
  MOD_RES (7)..(7): Alpha-Me R8-octenyl-alanine olefin amino acid connected by an all-carbon crosslinker comprising no double bonds
  misc_feature (7)..(14): Crosslink between residues
  MOD_RES (12)..(12): Norleucine
  MOD_RES (14)..(14): Alpha-Me S5-pentenyl-alanine olefin amino acid connected by an all-carbon crosslinker comprising no double bonds
  C-term NH2
QSQQTFANLWRLLAQN

SEQ ID NO: 864 - protein, 13 aa, Artificial Sequence
  Description of Artificial Sequence: Synthetic peptide
  N-term Ac
  MOD_RES (4)..(4): Alpha-Me R8-octenyl-alanine olefin amino acid connected by an all-carbon crosslinker comprising no double bonds
  misc_feature (4)..(11): Crosslink between residues
  MOD_RES (11)..(11): Alpha-Me S5-pentenyl-alanine olefin amino acid connected by an all-carbon crosslinker comprising no double bonds
  C-term NH2
LTFAHYWAQLASA

SEQ ID NO: 865 - protein, 14 aa, Artificial Sequence
  Description of Artificial Sequence: Synthetic peptide
  N-term Ac
  MOD_RES (1)..(1): Norleucine
  MOD_RES (5)..(5): Alpha-Me R8-octenyl-alanine olefin amino acid connected by an all-carbon crosslinker comprising no double bonds
  misc_feature (5)..(12): Crosslink between residues
  MOD_RES (12)..(12): Alpha-Me S5-pentenyl-alanine olefin amino acid connected by an all-carbon crosslinker comprising no double bonds
  C-term NH2
LPRFANYWRLLAQN

SEQ ID NO: 866 - protein, 14 aa, Artificial Sequence
  Description of Artificial Sequence: Synthetic peptide
  N-term Ac
  MOD_RES (1)..(1): Norleucine
  MOD_RES (5)..(5): Alpha-Me R8-octenyl-alanine olefin amino acid connected by an all-carbon crosslinker comprising no double bonds
  misc_feature (5)..(12): Crosslink between residues
  MOD_RES (8)..(8): 6cl-Trp
  MOD_RES (12)..(12): Alpha-Me S5-pentenyl-alanine olefin amino acid connected by an all-carbon crosslinker comprising no double bonds
  C-term NH2
LPRFANYWRLLAQN

SEQ ID NO: 867 - protein, 12 aa, Artificial Sequence
  Description of Artificial Sequence: Synthetic peptide
  N-term Ac
  MOD_RES (4)..(4): Alpha-Me R8-octenyl-alanine olefin amino acid connected by an all-carbon crosslinker comprising no double bonds
  misc_feature (4)..(11): Crosslink between residues
  MOD_RES (7)..(7): 6cl-Trp
  MOD_RES (11)..(11): Alpha-Me S5-pentenyl-alanine olefin amino acid connected by an all-carbon crosslinker comprising no double bonds
  C-term NH2
LTFAHYWAQLAS

SEQ ID NO: 868 - protein, 16 aa, Artificial Sequence
  Description of Artificial Sequence: Synthetic peptide
  N-term Ac
  MOD_RES (3)..(3): Alpha-Me S5-pentenyl-alanine olefin amino acid connected by an all-carbon crosslinker comprising no double bonds
  misc_feature (3)..(7): Crosslink between residues
  MOD_RES (7)..(7): Amino acid comprising two pentenyl-alanine olefin side chains, each of which is crosslinked to another amino acid as indicated via fully saturated hydrocarbon crosslinks
  misc_feature (7)..(14): Crosslink between residues
  MOD_RES (14)..(14): Alpha-Me R8-octenyl-alanine olefin amino acid connected by an all carbon crosslinker comprising no double bonds
  C-term NH2
QSAQTFANLWRLLAQN

SEQ ID NO: 869 - protein, 12 aa, Artificial Sequence
  Description of Artificial Sequence: Synthetic peptide
  N-term Ac
  MOD_RES (4)..(4): Alpha-Me R8-octenyl-alanine olefin amino acid connected by an all-carbon crosslinker comprising no double bonds
  misc_feature (4)..(11): Crosslink between residues
  MOD_RES (7)..(7): 6cl-Trp
  MOD_RES (11)..(11): Alpha-Me S5-pentenyl-alanine olefin amino acid connected by an all-carbon crosslinker comprising no double bonds
  C-term NH2
LTFAHYWRQLAS

SEQ ID NO: 870 - protein, 16 aa, Artificial Sequence
  Description of Artificial Sequence: Synthetic peptide
  N-term Ac
  MOD_RES (7)..(7): Alpha-Me R8-octenyl-alanine olefin amino acid connected by an all-carbon crosslinker comprising no double bonds
  misc_feature (7)..(14): Crosslink between residues
  MOD_RES (10)..(10): 6cl-Trp
  MOD_RES (14)..(14): Alpha-Me S5-pentenyl-alanine olefin amino acid connected by an all-carbon crosslinker comprising no double bonds
  C-term NH2
QSQQTFANLWRLLAQN

SEQ ID NO: 871 - protein, 16 aa, Artificial Sequence
  Description of Artificial Sequence: Synthetic peptide
  N-term Ac
  MOD_RES (1)..(1): Alpha-Me R8-octenyl-alanine olefin amino acid connected by an all-carbon crosslinker comprising no double bonds
  misc_feature (1)..(8): Crosslink between residues
  MOD_RES (8)..(8): Alpha-Me S5-pentenyl-alanine olefin amino acid connected by an all-carbon crosslinker comprising no double bonds
  MOD_RES (14)..(14): 2-aminoisobutyric acid
  C-term NH2
ASQQTFSALWRLLXQN

SEQ ID NO: 872 - protein, 12 aa, Artificial Sequence
  Description of Artificial Sequence: Synthetic peptide
  N-term Ac
  MOD_RES (4)..(4): Alpha-Me R8-octenyl-alanine olefin amino acid connected by an all-carbon crosslinker comprising no double bonds
  misc_feature (4)..(11): Crosslink between residues
  MOD_RES (11)..(11): Alpha-Me S5-pentenyl-alanine olefin amino acid connected by an all-carbon crosslinker comprising no double bonds
  C-term NH2
LTFAHYWAQLAS

SEQ ID NO: 873 - protein, 12 aa, Artificial Sequence
  Description of Artificial Sequence: Synthetic peptide
  N-term Ac
  MOD_RES (4)..(4): Alpha-Me R8-octenyl-alanine olefin amino acid connected by an all-carbon crosslinker comprising no double bonds
  misc_feature (4)..(11): Crosslink between residues
  MOD_RES (11)..(11): Alpha-Me S5-pentenyl-alanine olefin amino acid connected by an all-carbon crosslinker comprising no double bonds
  C-term NH2
TSFAQYWNLLAP

SEQ ID NO: 874 - protein, 12 aa, Artificial Sequence
  Description of Artificial Sequence: Synthetic peptide
  N-term Ac
  C-term NH2
LTFEHYWAQLTS

SEQ ID NO: 875 - protein, 9 aa, Artificial Sequence
  Description of Artificial Sequence: Synthetic peptide
  N-term Ac
  MOD_RES (2)..(2): Alpha-Me R8-octenyl-alanine olefin amino acid connected by an all-carbon crosslinker comprising one E configured double bond
  misc_feature (2)..(9): Crosslink between residues
  MOD_RES (5)..(5): 6cl-Trp
  MOD_RES (7)..(7): Ac3c
  MOD_RES (9)..(9): Alpha-Me S5-pentenyl-alanine olefin amino acid connected by an all-carbon crosslinker comprising one E configured double bond
  C-term NH2
FAAYWEXLA

SEQ ID NO: 876 - protein, 11 aa, Artificial Sequence
  Description of Artificial Sequence: Synthetic peptide
  N-term Ac
  MOD_RES (3)..(3): Alpha-Me R8-octenyl-alanine olefin amino acid connected by an all-carbon crosslinker comprising one double bond
  misc_feature (3)..(10): Crosslink between residues
  MOD_RES (10)..(10): Alpha-Me S5-pentenyl-alanine olefin amino acid connected by an all-carbon crosslinker comprising one double bond
  C-term NH2
AFAAAWALAAA

SEQ ID NO: 877 - protein, 11 aa, Artificial Sequence
  Description of Artificial Sequence: Synthetic peptide
  N-term Ac
  MOD_RES (3)..(3): Alpha-Me R8-octenyl-alanine olefin amino acid connected by an all-carbon crosslinker comprising one double bond
  misc_feature (3)..(10): Crosslink between residues
  MOD_RES (10)..(10): Alpha-Me S5-pentenyl-alanine olefin amino acid connected by an all-carbon crosslinker comprising one double bond
  C-term NH2
TFAAAWRLAAQ

SEQ ID NO: 878 - protein, 11 aa, Artificial Sequence
  Description of Artificial Sequence: Synthetic peptide
  N-term Pr
  MOD_RES (3)..(3): Alpha-Me R8-octenyl-alanine olefin amino acid connected by an all-carbon crosslinker comprising one double bond
  misc_feature (3)..(10): Crosslink between residues
  MOD_RES (10)..(10): Alpha-Me S5-pentenyl-alanine olefin amino acid connected by an all-carbon crosslinker comprising one double bond
  C-term NH2
TFAAAWRLAAQ

SEQ ID NO: 879 - protein, 12 aa, Artificial Sequence
  Description of Artificial Sequence: Synthetic peptide
  N-term Ac
  MOD_RES (4)..(4): Alpha-Me R8-octenyl-alanine olefin amino acid connected by an all-carbon crosslinker comprising one E configured double bond
  misc_feature (4)..(11): Crosslink between residues
  MOD_RES (11)..(11): Alpha-Me S5-pentenyl-alanine olefin amino acid connected by an all-carbon crosslinker comprising one E configured double bond
  C-term NH2
LTFAHYWAQLAS

SEQ ID NO: 880 - protein, 23 aa, Artificial Sequence
  Description of Artificial Sequence: Synthetic peptide
  N-term Ac
  MOD_RES (7)..(7): Beta-Ala
  MOD_RES (14)..(14): Alpha-Me R8-octenyl-alanine olefin amino acid connected by an all-carbon crosslinker comprising one double bond
  misc_feature (14)..(21): Crosslink between residues
  MOD_RES (21)..(21): Alpha-Me S5-pentenyl-alanine olefin amino acid connected by an all-carbon crosslinker comprising one double bond
  C-term NH2
CCPGCCAQSQQTFANLWRLLAQN

SEQ ID NO: 881 - protein, 23 aa, Artificial Sequence
  Description of Artificial Sequence: Synthetic peptide
  N-term Ac
  MOD_RES (7)..(7): Beta-Ala
  MOD_RES (14)..(14): Alpha-Me R8-octenyl-alanine olefin amino acid connected by an all-carbon crosslinker comprising one double bond
  misc_feature (14)..(21): Crosslink between residues
  MOD_RES (21)..(21): Alpha-Me S5-pentenyl-alanine olefin amino acid connected by an all-carbon crosslinker comprising one double bond
  C-term NH2
CCPGCCAQSQQTAANLWRLLAQN

SEQ ID NO: 882 - protein, 21 aa, Artificial Sequence
  Description of Artificial Sequence: Synthetic peptide
  N-term Ac
  MOD_RES (7)..(7): Beta-Ala
  MOD_RES (8)..(8): Norleucine
  MOD_RES (12)..(12): Alpha-Me R8-octenyl-alanine olefin amino acid connected by an all-carbon crosslinker comprising one double bond
  misc_feature (12)..(19): Crosslink between residues
  MOD_RES (19)..(19): Alpha-Me S5-pentenyl-alanine olefin amino acid connected by an all-carbon crosslinker comprising one double bond
  C-term NH2
CCPGCCALPRFANYWRLLAQN

SEQ ID NO: 883 - protein, 12 aa, Artificial Sequence
  Description of Artificial Sequence: Synthetic peptide
  N-term Ac
  MOD_RES (4)..(4): Alpha-Me R8-octenyl-alanine olefin amino acid that is not connected by a crosslinker
  MOD_RES (11)..(11): Alpha-Me S5-pentenyl-alanine olefin amino acid that is not connected by a crosslinker
  C-term NH2
LTFAHYWAQLAS

SEQ ID NO: 884 - protein, 9 aa, Artificial Sequence
  Description of Artificial Sequence: Synthetic peptide
  N-term Ac
  MOD_RES (2)..(2): Alpha-Me R8-octenyl-alanine olefin amino acid connected by an all-carbon crosslinker comprising no double bonds
  misc_feature (2)..(9): Crosslink between residues
  MOD_RES (5)..(5): 6cl-Trp
  MOD_RES (7)..(7): Ac3c
  MOD_RES (9)..(9): Alpha-Me S5-pentenyl-alanine olefin amino acid connected by an all-carbon crosslinker comprising no double bonds
  C-term NH2
FAHYWRXLA

SEQ ID NO: 885 - protein, 12 aa, Artificial Sequence
  Description of Artificial Sequence: Synthetic peptide
  N-term Ac
  MOD_RES (4)..(4): Alpha-Me R8-octenyl-alanine olefin amino acid connected by an all-carbon crosslinker comprising no double bonds
  misc_feature (4)..(11): Crosslink between residues
  MOD_RES (11)..(11): Alpha-Me S5-pentenyl-alanine olefin amino acid connected by an all-carbon crosslinker comprising no double bonds
  C-term NH2
QTFAHWWSQLAS

SEQ ID NO: 886 - protein, 12 aa, Artificial Sequence
  Description of Artificial Sequence: Synthetic peptide
  N-term Ac
  MOD_RES (4)..(4): Alpha-Me R8-octenyl-alanine olefin amino acid connected by an all-carbon crosslinker comprising one double bond
  misc_feature (4)..(11): Crosslink between residues
  MOD_RES (11)..(11): Alpha-Me S5-pentenyl-alanine olefin amino acid connected by an all-carbon crosslinker comprising one double bond
  C-term NH2
LTAAHYWRQLAS

SEQ ID NO: 887 - protein, 16 aa, Artificial Sequence
  Description of Artificial Sequence: Synthetic peptide
  N-term Ac
  MOD_RES (2)..(2): Alpha-Me R8-octenyl-alanine olefin amino acid connected by an all-carbon crosslinker comprising one double bond
  misc_feature (2)..(9): Crosslink between residues
  MOD_RES (9)..(9): Alpha-Me S5-pentenyl-alanine olefin amino acid connected by an all-carbon crosslinker comprising one double bond
  MOD_RES (14)..(14): 2-aminoisobutyric acid
  C-term NH2
QAQQTFSNAWRLLXQN

SEQ ID NO: 888 - protein, 16 aa, Artificial Sequence
  Description of Artificial Sequence: Synthetic peptide
  N-term Ac
  MOD_RES (5)..(5): Alpha-Me R8-octenyl-alanine olefin amino acid connected by an all-carbon crosslinker comprising one double bond
  misc_feature (5)..(12): Crosslink between residues
  MOD_RES (12)..(12): Alpha-Me S5-pentenyl-alanine olefin amino acid connected by an all-carbon crosslinker comprising one double bond
  MOD_RES (14)..(14): 2-aminoisobutyric acid
  C-term NH2
QSQQAFSNLWRALXQN

SEQ ID NO: 889 - protein, 10 aa, Artificial Sequence
  Description of Artificial Sequence: Synthetic peptide
  N-term Ac
  MOD_RES (2)..(2): Alpha-Me R8-octenyl-alanine olefin amino acid connected by an all-carbon crosslinker comprising one double bond
  misc_feature (2)..(9): Crosslink between residues
  MOD_RES (7)..(7): Ac3c
  MOD_RES (9)..(9): Alpha-Me S5-pentenyl-alanine olefin amino acid connected by an all-carbon crosslinker comprising one double bond
  C-term NH2
FAAYWEXLAA

SEQ ID NO: 890 - protein, 10 aa, Artificial Sequence
  Description of Artificial Sequence: Synthetic peptide
  N-term Ac
  MOD_RES (2)..(2): Alpha-Me R8-octenyl-alanine olefin amino acid connected by an all-carbon crosslinker comprising one double bond
  misc_feature (2)..(9): Crosslink between residues
  MOD_RES (7)..(7): Ac3c
  MOD_RES (9)..(9): Alpha-Me S5-pentenyl-alanine olefin amino acid connected by an all-carbon crosslinker comprising one double bond
  C-term NH2
FAAYWEXLAS

SEQ ID NO: 891 - protein, 10 aa, Artificial Sequence
  Description of Artificial Sequence: Synthetic peptide
  N-term Ac
  MOD_RES (2)..(2): Alpha-Me R8-octenyl-alanine olefin amino acid connected by an all-carbon crosslinker comprising one double bond
  misc_feature (2)..(9): Crosslink between residues
  MOD_RES (7)..(7): Ac3c
  MOD_RES (9)..(9): Alpha-Me S5-pentenyl-alanine olefin amino acid connected by an all-carbon crosslinker comprising one double bond
  C-term NH2
FAAYWEXLAQ

SEQ ID NO: 892 - protein, 10 aa, Artificial Sequence
  Description of Artificial Sequence: Synthetic peptide
  N-term Ac
  MOD_RES (2)..(2): Alpha-Me R8-octenyl-alanine olefin amino acid connected by an all-carbon crosslinker comprising one double bond
  misc_feature (2)..(9): Crosslink between residues
  MOD_RES (7)..(7): 2-aminoisobutyric acid
  MOD_RES (9)..(9): Alpha-Me S5-pentenyl-alanine olefin amino acid connected by an all-carbon crosslinker comprising one double bond
  C-term NH2
FAAYWEXLAS

SEQ ID NO: 893 - protein, 10 aa, Artificial Sequence
  Description of Artificial Sequence: Synthetic peptide
  N-term Ac
  MOD_RES (2)..(2): Alpha-Me R8-octenyl-alanine olefin amino acid connected by an all-carbon crosslinker comprising one double bond
  misc_feature (2)..(9): Crosslink between residues
  MOD_RES (9)..(9): Alpha-Me S5-pentenyl-alanine olefin amino acid connected by an all-carbon crosslinker comprising one double bond
  C-term NH2
FAAYWEALAS

SEQ ID NO: 894 - protein, 10 aa, Artificial Sequence
  Description of Artificial Sequence: Synthetic peptide
  N-term Ac
  MOD_RES (2)..(2): Alpha-Me R8-octenyl-alanine olefin amino acid connected by an all-carbon crosslinker comprising one double bond
  misc_feature (2)..(9): Crosslink between residues
  MOD_RES (9)..(9): Alpha-Me S5-pentenyl-alanine olefin amino acid connected by an all-carbon crosslinker comprising one double bond
  C-term NH2
FAAYWEQLAS

SEQ ID NO: 895 - protein, 10 aa, Artificial Sequence
  Description of Artificial Sequence: Synthetic peptide
  N-term Ac
  MOD_RES (2)..(2): Alpha-Me R8-octenyl-alanine olefin amino acid connected by an all-carbon crosslinker comprising one double bond
  misc_feature (2)..(9): Crosslink between residues
  MOD_RES (9)..(9): Alpha-Me S5-pentenyl-alanine olefin amino acid connected by an all-carbon crosslinker comprising one double bond
  C-term NH2
FAHYWEQLAS

SEQ ID NO: 896 - protein, 10 aa, Artificial Sequence
  Description of Artificial Sequence: Synthetic peptide
  N-term Ac
  MOD_RES (2)..(2): Alpha-Me R8-octenyl-alanine olefin amino acid connected by an all-carbon crosslinker comprising one double bond
  misc_feature (2)..(9): Crosslink between residues
  MOD_RES (9)..(9): Alpha-Me S5-pentenyl-alanine olefin amino acid connected by an all-carbon crosslinker comprising one double bond
  C-term NH2
FAHYWAQLAS

SEQ ID NO: 897 - protein, 10 aa, Artificial Sequence
  Description of Artificial Sequence: Synthetic peptide
  N-term Ac
  MOD_RES (2)..(2): Alpha-Me R8-octenyl-alanine olefin amino acid connected by an all-carbon crosslinker comprising one double bond
  misc_feature (2)..(9): Crosslink between residues
  MOD_RES (7)..(7): Ac3c
  MOD_RES (9)..(9): Alpha-Me S5-pentenyl-alanine olefin amino acid connected by an all-carbon crosslinker comprising one double bond
  C-term NH2
FAHYWAXLAS

SEQ ID NO: 898 - protein, 10 aa, Artificial Sequence
  Description of Artificial Sequence: Synthetic peptide
  N-term Ac
  MOD_RES (2)..(2): Alpha-Me R8-octenyl-alanine olefin amino acid connected by an all-carbon crosslinker comprising one double bond
  misc_feature (2)..(9): Crosslink between residues
  MOD_RES (7)..(7): Ac3c
  MOD_RES (9)..(9): Alpha-Me S5-pentenyl-alanine olefin amino acid connected by an all-carbon crosslinker comprising one double bond
  C-term NH2
FAHYWRXLAS

SEQ ID NO: 899 - protein, 10 aa, Artificial Sequence
  Description of Artificial Sequence: Synthetic peptide
  N-term Ac
  MOD_RES (2)..(2): Alpha-Me R8-octenyl-alanine olefin amino acid connected by an all-carbon crosslinker comprising one double bond
  misc_feature (2)..(9): Crosslink between residues
  MOD_RES (7)..(7): Ac3c
  MOD_RES (9)..(9): Alpha-hydrogen S5-pentenyl-alanine olefin amino acid connected by an all-carbon crosslinker comprising one double bond
  C-term NH2
FAAYWEXLAA

SEQ ID NO: 900 - protein, 14 aa, Artificial Sequence
  Description of Artificial Sequence: Synthetic peptide
  N-term Ac
  MOD_RES (1)..(1): Norleucine
  MOD_RES (5)..(5): Alpha-Me R8-octenyl-alanine olefin amino acid connected by an all-carbon crosslinker comprising no double bonds
  misc_feature (5)..(3): Crosslink between residues
  MOD_RES (12)..(12): Alpha-Me S5-pentenyl-alanine olefin amino acid connected by an all-carbon crosslinker comprising no double bonds
  C-term NH2
LPTFANYWRLLAQN

SEQ ID NO: 901 - protein, 11 aa, Artificial Sequence
  Description of Artificial Sequence: Synthetic peptide
  N-term Ac
  MOD_RES (3)..(3): Alpha-Me R8-octenyl-alanine olefin amino acid connected by an all-carbon crosslinker comprising one double bond
  misc_feature (3)..(10): Crosslink between residues
  MOD_RES (10)..(10): Alpha-Me S5-pentenyl-alanine olefin amino acid connected by an all-carbon crosslinker comprising one double bond
  C-term NH2
TFAAAWRALAQ

SEQ ID NO: 902 - protein, 12 aa, Artificial Sequence
  Description of Artificial Sequence: Synthetic peptide
  N-term Ac
  MOD_RES (4)..(4): Alpha-Me R8-octenyl-alanine olefin amino acid connected by an all-carbon crosslinker comprising no double bonds
  misc_feature (4)..(11): Crosslink between residues
  MOD_RES (11)..(11): Alpha-Me S5-pentenyl-alanine olefin amino acid connected by an all-carbon crosslinker comprising no double bonds
  C-term NH2
TSFAHYWAQLAS

SEQ ID NO: 903 - protein, 10 aa, Artificial Sequence
  Description of Artificial Sequence: Synthetic peptide
  N-term Ac
  MOD_RES (2)..(2): Alpha-Me R8-octenyl-alanine olefin amino acid connected by an all-carbon crosslinker comprising no double bonds
  misc_feature (2)..(9): Crosslink between residues
  MOD_RES (5)..(5): 6cl-Trp
  MOD_RES (7)..(7): Ac3c
  MOD_RES (9)..(9): Alpha-Me S5-pentenyl-alanine olefin amino acid connected by an all-carbon crosslinker comprising no double bonds
  C-term NH2
FAAYWEXLAA

SEQ ID NO: 904 - protein, 12 aa, Artificial Sequence
  Description of Artificial Sequence: Synthetic peptide
  N-term Ac
  MOD_RES (4)..(4): Alpha-Me R8-octenyl-alanine olefin amino acid connected by an all-carbon crosslinker comprising one double bond
  misc_feature (4)..(11): Crosslink between residues
  MOD_RES (11)..(11): Alpha-Me S5-pentenyl-alanine olefin amino acid connected by an all-carbon crosslinker comprising one double bond
  C-term NH2
LTFAHYWAQIAS

SEQ ID NO: 905 - protein, 12 aa, Artificial Sequence
  Description of Artificial Sequence: Synthetic peptide
  N-term Ac
  MOD_RES (4)..(4): Alpha-Me R8-octenyl-alanine olefin amino acid connected by an all-carbon crosslinker comprising one double bond
  misc_feature (4)..(11): Crosslink between residues
  MOD_RES (10)..(10): Norleucine
  MOD_RES (11)..(11): Alpha-Me S5-pentenyl-alanine olefin amino acid connected by an all-carbon crosslinker comprising one double bond
  C-term NH2
LTFAHYWAQLAS

SEQ ID NO: 906 - protein, 12 aa, Artificial Sequence
  Description of Artificial Sequence: Synthetic peptide
  N-term Ac
  MOD_RES (4)..(4): Alpha-Me R8-octenyl-alanine olefin amino acid connected by an all-carbon crosslinker comprising one double bond
  misc_feature (4)..(11): Crosslink between residues
  MOD_RES (11)..(11): Alpha-Me S5-pentenyl-alanine olefin amino acid connected by an all-carbon crosslinker comprising one double bond
  C-term NH2
LTFAHYWAQLAA

SEQ ID NO: 907 - protein, 12 aa, Artificial Sequence
  Description of Artificial Sequence: Synthetic peptide
  N-term Ac
  MOD_RES (4)..(4): Alpha-Me R8-octenyl-alanine olefin amino acid connected by an all-carbon crosslinker comprising one double bond
  misc_feature (4)..(11): Crosslink between residues
  MOD_RES (11)..(11): Alpha-Me S5-pentenyl-alanine olefin amino acid connected by an all-carbon crosslinker comprising one double bond
  MOD_RES (12)..(12): Abu
  C-term NH2
LTFAHYWAQLAX

SEQ ID NO: 908 - protein, 12 aa, Artificial Sequence
  Description of Artificial Sequence: Synthetic peptide
  N-term Ac
  MOD_RES (4)..(4): Alpha-Me R8-octenyl-alanine olefin amino acid connected by an all-carbon crosslinker comprising one double bond
  misc_feature (4)..(11): Crosslink between residues
  MOD_RES (8)..(8): Abu
  MOD_RES (11)..(11): Alpha-Me S5-pentenyl-alanine olefin amino acid connected by an all-carbon crosslinker comprising one double bond
  C-term NH2
LTFAHYWXQLAS

SEQ ID NO: 909 - protein, 12 aa, Artificial Sequence
  Description of Artificial Sequence: Synthetic peptide
  N-term Ac
  MOD_RES (4)..(4): Alpha-Me R8-octenyl-alanine olefin amino acid connected by an all-carbon crosslinker comprising one E configured double bond
  misc_feature (4)..(11): Crosslink between residues
  MOD_RES (11)..(11): Alpha-Me S5-pentenyl-alanine olefin amino acid connected by an all-carbon crosslinker comprising one E configured double bond
  C-term NH2
LTFAAYWAQLAS

SEQ ID NO: 910 - protein, 12 aa, Artificial Sequence
  Description of Artificial Sequence: Synthetic peptide
  N-term Ac
  MOD_RES (4)..(4): Alpha-Me R8-octenyl-alanine olefin amino acid connected by an all-carbon crosslinker comprising one double bond
  misc_feature (4)..(11): Crosslink between residues
  MOD_RES (11)..(11): Alpha-Me S5-pentenyl-alanine olefin amino acid connected by an all-carbon crosslinker comprising one double bond
  C-term NH2
LAFAHYWAQLAS

SEQ ID NO: 911 - protein, 12 aa, Artificial Sequence
  Description of Artificial Sequence: Synthetic peptide
  N-term Ac
  MOD_RES (4)..(4): Alpha-Me R8-octenyl-alanine olefin amino acid connected by an all-carbon crosslinker comprising one double bond
  misc_feature (4)..(11): Crosslink between residues
  MOD_RES (11)..(11): Alpha-Me S5-pentenyl-alanine olefin amino acid connected by an all-carbon crosslinker comprising one double bond
  C-term NH2
LAFAAYWAQLAS

SEQ ID NO: 912 - protein, 12 aa, Artificial Sequence
  Description of Artificial Sequence: Synthetic peptide
  N-term Ac
  MOD_RES (4)..(4): Alpha-Me R8-octenyl-alanine olefin amino acid connected by an all-carbon crosslinker comprising one E configured double bond
  misc_feature (4)..(11): Crosslink between residues
  MOD_RES (11)..(11): Alpha-Me S5-pentenyl-alanine olefin amino acid connected by an all-carbon crosslinker comprising one E configured double bond
  C-term NH2
LTFAAYWAQLAA

SEQ ID NO: 913 - protein, 12 aa, Artificial Sequence
  Description of Artificial Sequence: Synthetic peptide
  N-term Ac
  MOD_RES (4)..(4): Alpha-Me R8-octenyl-alanine olefin amino acid connected by an all-carbon crosslinker comprising one double bond
  misc_feature (4)..(11): Crosslink between residues
  MOD_RES (11)..(11): Alpha-Me S5-pentenyl-alanine olefin amino acid connected by an all-carbon crosslinker comprising one double bond
  C-term NH2
LAFAAYWAQLAA

SEQ ID NO: 914 - protein, 12 aa, Artificial Sequence
  Description of Artificial Sequence: Synthetic peptide
  N-term Ac
  MOD_RES (4)..(4): Alpha-Me R8-octenyl-alanine olefin amino acid connected by an all-carbon crosslinker comprising one double bond
  misc_feature (4)..(11): Crosslink between residues
  MOD_RES (9)..(9): Norleucine
  MOD_RES (11)..(11): Alpha-Me S5-pentenyl-alanine olefin amino acid connected by an all-carbon crosslinker comprising one double bond
  C-term NH2
LTFANLWALLAQ

SEQ ID NO: 915 - protein, 12 aa, Artificial Sequence
  Description of Artificial Sequence: Synthetic peptide
  N-term Ac
  MOD_RES (4)..(4): Alpha-Me R8-octenyl-alanine olefin amino acid connected by an all-carbon crosslinker comprising one double bond
  misc_feature (4)..(11): Crosslink between residues
  MOD_RES (9)..(9): Norleucine
  MOD_RES (11)..(11): Alpha-Me S5-pentenyl-alanine olefin amino acid connected by an all-carbon crosslinker comprising one double bond
  C-term NH2
LTFANLWALLAA

SEQ ID NO: 916 - protein, 12 aa, Artificial Sequence
  Description of Artificial Sequence: Synthetic peptide
  N-term Ac
  MOD_RES (4)..(4): Alpha-Me R8-octenyl-alanine olefin amino acid connected by an all-carbon crosslinker comprising one double bond
  misc_feature (4)..(11): Crosslink between residues
  MOD_RES (9)..(9): Norleucine
  MOD_RES (11)..(11): Alpha-Me S5-pentenyl-alanine olefin amino acid connected by an all-carbon crosslinker comprising one double bond
  C-term NH2
LTFAALWALLAQ

SEQ ID NO: 917 - protein, 12 aa, Artificial Sequence
  Description of Artificial Sequence: Synthetic peptide
  N-term Ac
  MOD_RES (4)..(4): Alpha-Me R8-octenyl-alanine olefin amino acid connected by an all-carbon crosslinker comprising one double bond
  misc_feature (4)..(11): Crosslink between residues
  MOD_RES (9)..(9): Norleucine
  MOD_RES (11)..(11): Alpha-Me S5-pentenyl-alanine olefin amino acid connected by an all-carbon crosslinker comprising one double bond
  C-term NH2
LAFANLWALLAQ

SEQ ID NO: 918 - protein, 12 aa, Artificial Sequence
  Description of Artificial Sequence: Synthetic peptide
  N-term Ac
  MOD_RES (4)..(4): Alpha-Me R8-octenyl-alanine olefin amino acid connected by an all-carbon crosslinker comprising one double bond
  misc_feature (4)..(11): Crosslink between residues
  MOD_RES (9)..(9): Norleucine
  MOD_RES (11)..(11): Alpha-Me S5-pentenyl-alanine olefin amino acid connected by an all-carbon crosslinker comprising one double bond
  C-term NH2
LAFAALWALLAA

SEQ ID NO: 919 - protein, 10 aa, Artificial Sequence
  Description of Artificial Sequence: Synthetic peptide
  N-term Ac
  MOD_RES (2)..(2): Alpha-Me R8-octenyl-alanine olefin amino acid connected by an all-carbon crosslinker comprising one double bond
  misc_feature (2)..(9): Crosslink between residues
  MOD_RES (7)..(7): Ac3c
  MOD_RES (9)..(9): Alpha-Me S5-pentenyl-alanine olefin amino acid connected by an all-carbon crosslinker comprising one double bond
  C-term NH2
AAAYWEXLAA

SEQ ID NO: 920 - protein, 11 aa, Artificial Sequence
  Description of Artificial Sequence: Synthetic peptide
  N-term Ac
  MOD_RES (2)..(2): Alpha-Me R8-octenyl-alanine olefin amino acid connected by an all-carbon crosslinker comprising one double bond
  misc_feature (2)..(9): Crosslink between residues
  MOD_RES (7)..(7): Ac3c
  MOD_RES (9)..(9): Alpha-Me S5-pentenyl-alanine olefin amino acid connected by an all-carbon crosslinker comprising one double bond
  C-term NH2
FAAYWEXLAAA

SEQ ID NO: 921 - protein, 10 aa, Artificial Sequence
  Description of Artificial Sequence: Synthetic peptide
  N-term Ac
  MOD_RES (2)..(2): Alpha-Me R8-octenyl-alanine olefin amino acid connected by an all-carbon crosslinker comprising one double bond
  misc_feature (2)..(9): Crosslink between residues
  MOD_RES (7)..(7): Ac3c
  MOD_RES (9)..(9): Alpha-Me S5-pentenyl-alanine olefin amino acid connected by an all-carbon crosslinker comprising one double bond
  MOD_RES (10)..(10): Abu
  C-term NH2
FAAYWEXLAX

SEQ ID NO: 922 - protein, 10 aa, Artificial Sequence
  Description of Artificial Sequence: Synthetic peptide
  N-term Ac
  MOD_RES (2)..(2): Alpha-Me R8-octenyl-alanine olefin amino acid connected by an all-carbon crosslinker comprising one double bond
  misc_feature (2)..(9): Crosslink between residues
  MOD_RES (7)..(7): Ac3c
  MOD_RES (9)..(9): Alpha-Me S5-pentenyl-alanine olefin amino acid connected by an all-carbon crosslinker comprising one double bond
  MOD_RES (10)..(10): Norleucine
  C-term NH2
FAAYWEXLAL

SEQ ID NO: 923 - protein, 10 aa, Artificial Sequence
  Description of Artificial Sequence: Synthetic peptide
  N-term Ac
  MOD_RES (2)..(2): Alpha-Me R5-pentenyl-alanine olefin amino acid connected by an all-carbon crosslinker comprising one double bond
  misc_feature (2)..(9): Crosslink between residues
  MOD_RES (7)..(7): Ac3c
  MOD_RES (9)..(9): Alpha-Me S8-octenyl-alanine olefin amino acid connected by an all-carbon crosslinker comprising one double bond
  C-term NH2
FAAYWEXLAA

SEQ ID NO: 924 - protein, 10 aa, Artificial Sequence
  Description of Artificial Sequence: Synthetic peptide
  N-term Ac
  MOD_RES (2)..(2): Alpha-Me S5-pentenyl-alanine olefin amino acid connected by an all-carbon crosslinker comprising one double bond
  misc_feature (2)..(9): Crosslink between residues
  MOD_RES (7)..(7): Ac3c
  MOD_RES (9)..(9): Alpha-Me R8-octenyl-alanine olefin amino acid connected by an all-carbon crosslinker comprising one double bond
  C-term NH2
FAAYWEXLAA

SEQ ID NO: 925 - protein, 10 aa, Artificial Sequence
  Description of Artificial Sequence: Synthetic peptide
  N-term Ac
  MOD_RES (2)..(2): Alpha-Me R8-octenyl-alanine olefin amino acid connected by an all-carbon crosslinker comprising one double bond
  misc_feature (2)..(9): Crosslink between residues
  MOD_RES (7)..(7): Ac3c
  MOD_RES (9)..(9): Alpha-Me S5-pentenyl-alanine olefin amino acid connected by an all-carbon crosslinker comprising one double bond
  C-term NH2
FAAYWEXIAA

SEQ ID NO: 926 - protein, 10 aa, Artificial Sequence
  Description of Artificial Sequence: Synthetic peptide
  N-term Ac
  MOD_RES (2)..(2): Alpha-Me R8-octenyl-alanine olefin amino acid connected by an all-carbon crosslinker comprising one double bond
  misc_feature (2)..(9): Crosslink between residues
  MOD_RES (7)..(7): Ac3c
  MOD_RES (8)..(8): Norleucine
  MOD_RES (9)..(9): Alpha-Me S5-pentenyl-alanine olefin amino acid connected by an all-carbon crosslinker comprising one double bond
  C-term NH2
FAAYWEXLAA

SEQ ID NO: 927 - protein, 10 aa, Artificial Sequence
  Description of Artificial Sequence: Synthetic peptide
  N-term Ac
  MOD_RES (2)..(2): Alpha-Me R8-octenyl-alanine olefin amino acid connected by an all-carbon crosslinker comprising one double bond
  misc_feature (2)..(9): Crosslink between residues
  MOD_RES (7)..(7): Alpha-Me-Leu
  MOD_RES (9)..(9): Alpha-Me S5-pentenyl-alanine olefin amino acid connected by an all-carbon crosslinker comprising one double bond
  C-term NH2
FAAYWELLAA

SEQ ID NO: 928 - protein, 10 aa, Artificial Sequence
  Description of Artificial Sequence: Synthetic peptide
  N-term Ac
  MOD_RES (2)..(2): Alpha-Me R8-octenyl-alanine olefin amino acid connected by an all-carbon crosslinker comprising one double bond
  misc_feature (2)..(9): Crosslink between residues
  MOD_RES (7)..(7): Norleucine
  MOD_RES (9)..(9): Alpha-Me S5-pentenyl-alanine olefin amino acid connected by an all-carbon crosslinker comprising one double bond
  C-term NH2
FAAYWELLAA

SEQ ID NO: 929 - protein, 10 aa, Artificial Sequence
  Description of Artificial Sequence: Synthetic peptide
  N-term Ac
  MOD_RES (2)..(2): Alpha-Me R8-octenyl-alanine olefin amino acid connected by an all-carbon crosslinker comprising one double bond
  misc_feature (2)..(9): Crosslink between residues
  MOD_RES (7)..(7): Ac3c
  MOD_RES (9)..(9): Alpha-Me S5-pentenyl-alanine olefin amino acid connected by an all-carbon crosslinker comprising one double bond
  C-term NH2
FAAYWQXLAA

SEQ ID NO: 930 - protein, 10 aa, Artificial Sequence
  Description of Artificial Sequence: Synthetic peptide
  N-term Ac
  MOD_RES (2)..(2): Alpha-Me R8-octenyl-alanine olefin amino acid connected by an all-carbon crosslinker comprising one double bond
  misc_feature (2)..(9): Crosslink between residues
  MOD_RES (7)..(7): Ac3c
  MOD_RES (9)..(9): Alpha-Me S5-pentenyl-alanine olefin amino acid connected by an all-carbon crosslinker comprising one double bond
  C-term NH2
FAAYWAXLAA

SEQ ID NO: 931 - protein, 10 aa, Artificial Sequence
  Description of Artificial Sequence: Synthetic peptide
  N-term Ac
  MOD_RES (2)..(2): Alpha-Me R8-octenyl-alanine olefin amino acid connected by an all-carbon crosslinker comprising one double bond
  misc_feature (2)..(9): Crosslink between residues
  MOD_RES (6)..(6): Abu
  MOD_RES (7)..(7): Ac3c
  MOD_RES (9)..(9): Alpha-Me S5-pentenyl-alanine olefin amino acid connected by an all-carbon crosslinker comprising one double bond
  C-term NH2
FAAYWXXLAA

SEQ ID NO: 932 - protein, 10 aa, Artificial Sequence
  Description of Artificial Sequence: Synthetic peptide
  N-term Ac
  MOD_RES (2)..(2): Alpha-Me R8-octenyl-alanine olefin amino acid connected by an all-carbon crosslinker comprising one double bond
  misc_feature (2)..(9): Crosslink between residues
  MOD_RES (6)..(6): Norleucine
  MOD_RES (7)..(7): Ac3c
  MOD_RES (9)..(9): Alpha-Me S5-pentenyl-alanine olefin amino acid connected by an all-carbon crosslinker comprising one double bond
  C-term NH2
FAAYWLXLAA

SEQ ID NO: 933 - protein, 10 aa, Artificial Sequence
  Description of Artificial Sequence: Synthetic peptide
  N-term Ac
  MOD_RES (2)..(2): Alpha-Me R8-octenyl-alanine olefin amino acid connected by an all-carbon crosslinker comprising one double bond
  misc_feature (2)..(9): Crosslink between residues
  MOD_RES (3)..(3): Abu
  MOD_RES (7)..(7): Ac3c
  MOD_RES (9)..(9): Alpha-Me S5-pentenyl-alanine olefin amino acid connected by an all-carbon crosslinker comprising one double bond
  C-term NH2
FAXYWEXLAA

SEQ ID NO: 934 - protein, 10 aa, Artificial Sequence
  Description of Artificial Sequence: Synthetic peptide
  N-term Ac
  MOD_RES (2)..(2): Alpha-Me R8-octenyl-alanine olefin amino acid connected by an all-carbon crosslinker comprising one double bond
  misc_feature (2)..(9): Crosslink between residues
  MOD_RES (3)..(3): Norleucine
  MOD_RES (7)..(7): Ac3c
  MOD_RES (9)..(9): Alpha-Me S5-pentenyl-alanine olefin amino acid connected by an all-carbon crosslinker comprising one double bond
  C-term NH2
FALYWEXLAA

SEQ ID NO: 935 - protein, 13 aa, Artificial Sequence
  Description of Artificial Sequence: Synthetic peptide
  N-term 5-FAM
  MOD_RES (1)..(1): Beta-Ala
  C-term NH2
ALTFEHYWAQLTS

SEQ ID NO: 936 - protein, 13 aa, Artificial Sequence
  Description of Artificial Sequence: Synthetic peptide
  N-term 5-FAM
  MOD_RES (1)..(1): Beta-Ala
  MOD_RES (5)..(5): Alpha-Me R8-octenyl-alanine olefin amino acid connected by an all-carbon crosslinker comprising no double bonds
  misc_feature (5)..(12): Crosslink between residues
  MOD_RES (12)..(12): Alpha-Me S5-pentenyl-alanine olefin amino acid connected by an all-carbon crosslinker comprising no double bonds
  C-term NH2
ALTFAHYWAQLAS

SEQ ID NO: 937 - protein, 12 aa, Artificial Sequence
  Description of Artificial Sequence: Synthetic peptide
  N-term Ac
  MOD_RES (4)..(4): Alpha-Me R8-octenyl-alanine olefin amino acid connected by an all-carbon crosslinker comprising one double bond
  misc_feature (4)..(11): Crosslink between residues
  MOD_RES (10)..(10): hLeu
  MOD_RES (11)..(11): Alpha-Me S5-pentenyl-alanine olefin amino acid connected by an all-carbon crosslinker comprising one double bond
  C-term NH2
LTFAHYWAQLAS

SEQ ID NO: 938 - protein, 12 aa, Artificial Sequence
  Description of Artificial Sequence: Synthetic peptide
  N-term Ac
  MOD_RES (4)..(4): Alpha-Me R8-octenyl-alanine olefin amino acid connected by an all-carbon crosslinker comprising one double bond
  misc_feature (4)..(11): Crosslink between residues
  MOD_RES (10)..(10): Tert-butyl-Gly
  MOD_RES (11)..(11): Alpha-Me S5-pentenyl-alanine olefin amino acid connected by an all-carbon crosslinker comprising one double bond
  C-term NH2
LTFAHYWAQGAS

SEQ ID NO: 939 - protein, 12 aa, Artificial Sequence
  Description of Artificial Sequence: Synthetic peptide
  N-term Ac
  MOD_RES (4)..(4): Alpha-Me R8-octenyl-alanine olefin amino acid connected by an all-carbon crosslinker comprising one double bond
  misc_feature (4)..(11): Crosslink between residues
  MOD_RES (10)..(10): Adamantyl-Gly
  MOD_RES (11)..(11): Alpha-Me S5-pentenyl-alanine olefin amino acid connected by an all-carbon crosslinker comprising one double bond
  C-term NH2
LTFAHYWAQGAS

SEQ ID NO: 940 - protein, 12 aa, Artificial Sequence
  Description of Artificial Sequence: Synthetic peptide
  N-term Ac
  MOD_RES (4)..(4): Alpha-Me R8-octenyl-alanine olefin amino acid connected by an all-carbon crosslinker comprising one double bond
  misc_feature (4)..(11): Crosslink between residues
  MOD_RES (10)..(10): homo-cyclohexyl-Ala
  MOD_RES (11)..(11): Alpha-Me S5-pentenyl-alanine olefin amino acid connected by an all-carbon crosslinker comprising one double bond
  C-term NH2
LTFAHYWAQAAS

SEQ ID NO: 941 - protein, 12 aa, Artificial Sequence
  Description of Artificial Sequence: Synthetic peptide
  N-term Ac
  MOD_RES (4)..(4): Alpha-Me R8-octenyl-alanine olefin amino acid connected by an all-carbon crosslinker comprising one double bond
  misc_feature (4)..(11): Crosslink between residues
  MOD_RES (10)..(10): Cyclohexyl-Ala
  MOD_RES (11)..(11): Alpha-Me S5-pentenyl-alanine olefin amino acid connected by an all-carbon crosslinker comprising one double bond
  C-term NH2
LTFAHYWAQAAS

SEQ ID NO: 942 - protein, 12 aa, Artificial Sequence
  Description of Artificial Sequence: Synthetic peptide
  N-term Ac
  MOD_RES (4)..(4): Alpha-Me R8-octenyl-alanine olefin amino acid connected by an all-carbon crosslinker comprising one double bond
  misc_feature (4)..(11): Crosslink between residues
  MOD_RES (8)..(8): Ac6c
  MOD_RES (11)..(11): Alpha-Me S5-pentenyl-alanine olefin amino acid connected by an all-carbon crosslinker comprising one double bond
  C-term NH2
LTFAHYWXQLAS

SEQ ID NO: 943 - protein, 12 aa, Artificial Sequence
  Description of Artificial Sequence: Synthetic peptide
  N-term Ac
  MOD_RES (4)..(4): Alpha-Me R8-octenyl-alanine olefin amino acid connected by an all-carbon crosslinker comprising one double bond
  misc_feature (4)..(11): Crosslink between residues
  MOD_RES (8)..(8): Ac5c
  MOD_RES (11)..(11): Alpha-Me S5-pentenyl-alanine olefin amino acid connected by an all-carbon crosslinker comprising one double bond
  C-term NH2
LTFAHYWXQLAS

SEQ ID NO: 944 - protein, 12 aa, Artificial Sequence
  Description of Artificial Sequence: Synthetic peptide
  N-term Ac
  MOD_RES (3)..(3): homo-Phe
  MOD_RES (4)..(4): Alpha-Me R8-octenyl-alanine olefin amino acid connected by an all-carbon crosslinker comprising one double bond
  misc_feature (4)..(11): Crosslink between residues
  MOD_RES (11)..(11): Alpha-Me S5-pentenyl-alanine olefin amino acid connected by an all-carbon crosslinker comprising one double bond
  C-term NH2
LTFAHYWAQLAS

SEQ ID NO: 945 - protein, 12 aa, Artificial Sequence
  Description of Artificial Sequence: Synthetic peptide
  N-term Ac
  MOD_RES (3)..(3): Indanyl-Gly
  MOD_RES (4)..(4): Alpha-Me R8-octenyl-alanine olefin amino acid connected by an all-carbon crosslinker comprising one double bond
  misc_feature (4)..(11): Crosslink between residues
  MOD_RES (11)..(11): Alpha-Me S5-pentenyl-alanine olefin amino acid connected by an all-carbon crosslinker comprising one double bond
  C-term NH2
LTGAHYWAQLAS

SEQ ID NO: 946 - protein, 12 aa, Artificial Sequence
  Description of Artificial Sequence: Synthetic peptide
  N-term Ac
  MOD_RES (4)..(4): Alpha-Me R8-octenyl-alanine olefin amino acid connected by an all-carbon crosslinker comprising one double bond
  misc_feature (4)..(11): Crosslink between residues
  MOD_RES (10)..(10): Cyclohexyl-Gly
  MOD_RES (11)..(11): Alpha-Me S5-pentenyl-alanine olefin amino acid connected by an all-carbon crosslinker comprising one double bond
  C-term NH2
LTFAHYWAQGAS

SEQ ID NO: 947 - protein, 12 aa, Artificial Sequence
  Description of Artificial Sequence: Synthetic peptide
  N-term Ac
  MOD_RES (4)..(4): Alpha-Me R8-octenyl-alanine olefin amino acid connected by an all-carbon crosslinker comprising one double bond
  misc_feature (4)..(11): Crosslink between residues
  MOD_RES (11)..(11): Alpha-Me S5-pentenyl-alanine olefin amino acid connected by an all-carbon crosslinker comprising one double bond
  C-term NH2
LTFAHYWAQFAS

SEQ ID NO: 948 - protein, 12 aa, Artificial Sequence
  Description of Artificial Sequence: Synthetic peptide
  N-term Ac
  MOD_RES (4)..(4): Alpha-Me R8-octenyl-alanine olefin amino acid connected by an all-carbon crosslinker comprising one double bond
  misc_feature (4)..(11): Crosslink between residues
  MOD_RES (10)..(10): Indanyl-Gly
  MOD_RES (11)..(11): Alpha-Me S5-pentenyl-alanine olefin amino acid connected by an all-carbon crosslinker comprising one double bond
  C-term NH2
LTFAHYWAQGAS

SEQ ID NO: 949 - protein, 12 aa, Artificial Sequence
  Description of Artificial Sequence: Synthetic peptide
  N-term Ac
  MOD_RES (4)..(4): Alpha-Me R8-octenyl-alanine olefin amino acid connected by an all-carbon crosslinker comprising one double bond
  misc_feature (4)..(11): Crosslink between residues
  MOD_RES (10)..(10): Cyclobutyl-Ala
  MOD_RES (11)..(11): Alpha-Me S5-pentenyl-alanine olefin amino acid connected by an all-carbon crosslinker comprising one double bond
  C-term NH2
LTFAHYWAQAAS

SEQ ID NO: 950 - protein, 12 aa, Artificial Sequence
  Description of Artificial Sequence: Synthetic peptide
  N-term Ac
  MOD_RES (4)..(4): Alpha-Me R8-octenyl-alanine olefin amino acid connected by an all-carbon crosslinker comprising one double bond
  misc_feature (4)..(11): Crosslink between residues
  MOD_RES (10)..(10): Cyclopentyl-Gly
  MOD_RES (11)..(11): Alpha-Me S5-pentenyl-alanine olefin amino acid connected by an all-carbon crosslinker comprising one double bond
  C-term NH2
LTFAHYWAQGAS

SEQ ID NO: 951 - protein, 12 aa, Artificial Sequence
  Description of Artificial Sequence: Synthetic peptide
  N-term Ac
  MOD_RES (4)..(4): Alpha-Me R8-octenyl-alanine olefin amino acid connected by an all-carbon crosslinker comprising one double bond
  misc_feature (4)..(11): Crosslink between residues
  MOD_RES (6)..(6): hY
  MOD_RES (11)..(11): Alpha-Me S5-pentenyl-alanine olefin amino acid connected by an all-carbon crosslinker comprising one double bond
  C-term NH2
LTFAHYWAQLAS

SEQ ID NO: 952 - protein, 10 aa, Artificial Sequence
  Description of Artificial Sequence: Synthetic peptide
  N-term Ac
  MOD_RES (2)..(2): Alpha-Me R8-octenyl-alanine olefin amino acid connected by an all-carbon crosslinker comprising one double bond
  misc_feature (2)..(9): Crosslink between residues
  MOD_RES (7)..(7): Ac3c
  MOD_RES (8)..(8): hLeu
  MOD_RES (9)..(9): Alpha-Me S5-pentenyl-alanine olefin amino acid connected by an all-carbon crosslinker comprising one double bond
  C-term NH2
FAAYWEXLAA

SEQ ID NO: 953 - protein, 10 aa, Artificial Sequence
  Description of Artificial Sequence: Synthetic peptide
  N-term Ac
  MOD_RES (2)..(2): Alpha-Me R8-octenyl-alanine olefin amino acid connected by an all-carbon crosslinker comprising one double bond
  misc_feature (2)..(9): Crosslink between residues
  MOD_RES (7)..(7): Ac3c
  MOD_RES (8)..(8): Tert-butyl-Gly
  MOD_RES (9)..(9): Alpha-Me S5-pentenyl-alanine olefin amino acid connected by an all-carbon crosslinker comprising one double bond
  C-term NH2
FAAYWEXGAA

SEQ ID NO: 954 - protein, 10 aa, Artificial Sequence
  Description of Artificial Sequence: Synthetic peptide
  N-term Ac
  MOD_RES (2)..(2): Alpha-Me R8-octenyl-alanine olefin amino acid connected by an all-carbon crosslinker comprising one double bond
  misc_feature (2)..(9): Crosslink between residues
  MOD_RES (7)..(7): Ac3c
  MOD_RES (8)..(8): Adamantyl-Gly
  MOD_RES (9)..(9): Alpha-Me S5-pentenyl-alanine olefin amino acid connected by an all-carbon crosslinker comprising one double bond
  C-term NH2
FAAYWEXGAA

SEQ ID NO: 955 - protein, 10 aa, Artificial Sequence
  Description of Artificial Sequence: Synthetic peptide
  N-term Ac
  MOD_RES (2)..(2): Alpha-Me R8-octenyl-alanine olefin amino acid connected by an all-carbon crosslinker comprising one double bond
  misc_feature (2)..(9): Crosslink between residues
  MOD_RES (7)..(7): Ac3c
  MOD_RES (8)..(8): homo-cyclohexyl-Ala
  MOD_RES (9)..(9): Alpha-Me S5-pentenyl-alanine olefin amino acid connected by an all-carbon crosslinker comprising one double bond
  C-term NH2
FAAYWEXAAA

SEQ ID NO: 956 - protein, 10 aa, Artificial Sequence
  Description of Artificial Sequence: Synthetic peptide
  N-term Ac
  MOD_RES (2)..(2): Alpha-Me R8-octenyl-alanine olefin amino acid connected by an all-carbon crosslinker comprising one double bond
  misc_feature (2)..(9): Crosslink between residues
  MOD_RES (7)..(7): Ac3c
  MOD_RES (8)..(8): Cyclohexyl-Ala
  MOD_RES (9)..(9): Alpha-Me S5-pentenyl-alanine olefin amino acid connected by an all-carbon crosslinker comprising one double bond
  C-term NH2
FAAYWEXAAA

SEQ ID NO: 957 - protein, 10 aa, Artificial Sequence
  Description of Artificial Sequence: Synthetic peptide
  N-term Ac
  MOD_RES (2)..(2): Alpha-Me R8-octenyl-alanine olefin amino acid connected by an all-carbon crosslinker comprising one double bond
  misc_feature (2)..(9): Crosslink between residues
  MOD_RES (7)..(7): Ac6c
  MOD_RES (9)..(9): Alpha-Me S5-pentenyl-alanine olefin amino acid connected by an all-carbon crosslinker comprising one double bond
  C-term NH2
FAAYWEXLAA

SEQ ID NO: 958 - protein, 10 aa, Artificial Sequence
  Description of Artificial Sequence: Synthetic peptide
  N-term Ac
  MOD_RES (2)..(2): Alpha-Me R8-octenyl-alanine olefin amino acid connected by an all-carbon crosslinker comprising one double bond
  misc_feature (2)..(9): Crosslink between residues
  MOD_RES (7)..(7): Ac5c
  MOD_RES (9)..(9): Alpha-Me S5-pentenyl-alanine olefin amino acid connected by an all-carbon crosslinker comprising one double bond
  C-term NH2
FAAYWEXLAA

SEQ ID NO: 959 - protein, 10 aa, Artificial Sequence
  Description of Artificial Sequence: Synthetic peptide
  N-term Ac
  MOD_RES (1)..(1): homo-Phe
  MOD_RES (2)..(2): Alpha-Me R8-octenyl-alanine olefin amino acid connected by an all-carbon crosslinker comprising one double bond
  misc_feature (2)..(9): Crosslink between residues
  MOD_RES (7)..(7): Ac3c
  MOD_RES (9)..(9): Alpha-Me S5-pentenyl-alanine olefin amino acid connected by an all-carbon crosslinker comprising one double bond
  C-term NH2
FAAYWEXLAA

SEQ ID NO: 960 - protein, 10 aa, Artificial Sequence
  Description of Artificial Sequence: Synthetic peptide
  N-term Ac
  MOD_RES (1)..(1): Indanyl-Gly
  MOD_RES (2)..(2): Alpha-Me R8-octenyl-alanine olefin amino acid connected by an all-carbon crosslinker comprising one double bond
  misc_feature (2)..(9): Crosslink between residues
  MOD_RES (7)..(7): Ac3c
  MOD_RES (9)..(9): Alpha-Me S5-pentenyl-alanine olefin amino acid connected by an all-carbon crosslinker comprising one double bond
  C-term NH2
GAAYWEXLAA

SEQ ID NO: 961 - protein, 10 aa, Artificial Sequence
  Description of Artificial Sequence: Synthetic peptide
  N-term Ac
  MOD_RES (2)..(2): Alpha-Me R8-octenyl-alanine olefin amino acid connected by an all-carbon crosslinker comprising one double bond
  misc_feature (2)..(9): Crosslink between residues
  MOD_RES (7)..(7): Ac3c
  MOD_RES (9)..(9): Alpha-Me S5-pentenyl-alanine olefin amino acid connected by an all-carbon crosslinker comprising one double bond
  C-term NH2
FAAYWEXFAA

SEQ ID NO: 962 - protein, 10 aa, Artificial Sequence
  Description of Artificial Sequence: Synthetic peptide
  N-term Ac
  MOD_RES (2)..(2): Alpha-Me R8-octenyl-alanine olefin amino acid connected by an all-carbon crosslinker comprising one double bond
  misc_feature (2)..(9): Crosslink between residues
  MOD_RES (7)..(7): Ac3c
  MOD_RES (8)..(8): Indanyl-Gly
  MOD_RES (9)..(9): Alpha-Me S5-pentenyl-alanine olefin amino acid connected by an all-carbon crosslinker comprising one double bond
  C-term NH2
FAAYWEXGAA

SEQ ID NO: 963 - protein, 10 aa, Artificial Sequence
  Description of Artificial Sequence: Synthetic peptide
  N-term Ac
  MOD_RES (2)..(2): Alpha-Me R8-octenyl-alanine olefin amino acid connected by an all-carbon crosslinker comprising one double bond
  misc_feature (2)..(9): Crosslink between residues
  MOD_RES (7)..(7): Ac3c
  MOD_RES (8)..(8): Cyclobutyl-Ala
  MOD_RES (9)..(9): Alpha-Me S5-pentenyl-alanine olefin amino acid connected by an all-carbon crosslinker comprising one double bond
  C-term NH2
FAAYWEXAAA

SEQ ID NO: 964 - protein, 10 aa, Artificial Sequence
  Description of Artificial Sequence: Synthetic peptide
  N-term Ac
  MOD_RES (2)..(2): Alpha-Me R8-octenyl-alanine olefin amino acid connected by an all-carbon crosslinker comprising one double bond
  misc_feature (2)..(9): Crosslink between residues
  MOD_RES (7)..(7): Ac3c
  MOD_RES (8)..(8): Cyclopentyl-Gly
  MOD_RES (9)..(9): Alpha-Me S5-pentenyl-alanine olefin amino acid connected by an all-carbon crosslinker comprising one double bond
  C-term NH2
FAAYWEXGAA

SEQ ID NO: 965 - protein, 10 aa, Artificial Sequence
  Description of Artificial Sequence: Synthetic peptide
  N-term Ac
  MOD_RES (2)..(2): Alpha-Me R8-octenyl-alanine olefin amino acid connected by an all-carbon crosslinker comprising one double bond
  misc_feature (2)..(9): Crosslink between residues
  MOD_RES (4)..(4): hY
  MOD_RES (7)..(7): Ac3c
  MOD_RES (9)..(9): Alpha-Me S5-pentenyl-alanine olefin amino acid connected by an all-carbon crosslinker comprising one double bond
  C-term NH2
FAAYWEXLAA

SEQ ID NO: 966 - protein, 10 aa, Artificial Sequence
  Description of Artificial Sequence: Synthetic peptide
  N-term Ac
  MOD_RES (2)..(2): Alpha-Me R8-octenyl-alanine olefin amino acid connected by an all-carbon crosslinker comprising one double bond
  misc_feature (2)..(9): Crosslink between residues
  MOD_RES (7)..(7): Ac3c
  MOD_RES (9)..(9): Alpha-Me S5-pentenyl-alanine olefin amino acid connected by an all-carbon crosslinker comprising one double bond
  C-term NH2
FAAYWEXLAQ

SEQ ID NO: 967 - protein, 10 aa, Artificial Sequence
  Description of Artificial Sequence: Synthetic peptide
  N-term Ac
  MOD_RES (2)..(2): Alpha-Me R8-octenyl-alanine olefin amino acid connected by an all-carbon crosslinker comprising one double bond
  misc_feature (2)..(9): Crosslink between residues
  MOD_RES (7)..(7): 2-aminoisobutyric acid
  MOD_RES (9)..(9): Alpha-Me S5-pentenyl-alanine olefin amino acid connected by an all-carbon crosslinker comprising one double bond
  C-term NH2
FAAYWEXLAA

SEQ ID NO: 968 - protein, 10 aa, Artificial Sequence
  Description of Artificial Sequence: Synthetic peptide
  N-term Ac
  MOD_RES (2)..(2): Alpha-Me R8-octenyl-alanine olefin amino acid connected by an all-carbon crosslinker comprising one double bond
  misc_feature (2)..(9): Crosslink between residues
  MOD_RES (9)..(9): Alpha-Me S5-pentenyl-alanine olefin amino acid connected by an all-carbon crosslinker comprising one double bond
  C-term NH2
FAAYWEALAA

SEQ ID NO: 969 - protein, 12 aa, Artificial Sequence
  Description of Artificial Sequence: Synthetic peptide
  N-term Ac
  MOD_RES (4)..(4): Alpha-Me R8-octenyl-alanine olefin amino acid connected by an all-carbon crosslinker comprising one double bond
  misc_feature (4)..(11): Crosslink between residues
  MOD_RES (11)..(11): Alpha-Me S5-pentenyl-alanine olefin amino acid connected by an all-carbon crosslinker comprising one double bond
  C-term NH2
LAFAAYWAALAA

SEQ ID NO: 970 - protein, 12 aa, Artificial Sequence
  Description of Artificial Sequence: Synthetic peptide
  N-term Ac
  MOD_RES (4)..(4): Alpha-Me R8-octenyl-alanine olefin amino acid connected by an all-carbon crosslinker comprising one double bond
  misc_feature (4)..(11): Crosslink between residues
  MOD_RES (9)..(9): Ac3c
  MOD_RES (11)..(11): Alpha-Me S5-pentenyl-alanine olefin amino acid connected by an all-carbon crosslinker comprising one double bond
  C-term NH2
LTFAHYWAXLAS

SEQ ID NO: 971 - protein, 12 aa, Artificial Sequence
  Description of Artificial Sequence: Synthetic peptide
  N-term Ac
  MOD_RES (1)..(1): Norleucine
  MOD_RES (4)..(4): Alpha-Me R8-octenyl-alanine olefin amino acid connected by an all-carbon crosslinker comprising one double bond
  misc_feature (4)..(11): Crosslink between residues
  MOD_RES (11)..(11): Alpha-Me S5-pentenyl-alanine olefin amino acid connected by an all-carbon crosslinker comprising one double bond
  C-term NH2
LTFAHYWAQLAS

SEQ ID NO: 972 - protein, 12 aa, Artificial Sequence
  Description of Artificial Sequence: Synthetic peptide
  N-term Ac
  MOD_RES (4)..(4): Alpha-Me R8-octenyl-alanine olefin amino acid connected by an all-carbon crosslinker comprising one double bond
  misc_feature (4)..(11): Crosslink between residues
  MOD_RES (11)..(11): Alpha-Me S5-pentenyl-alanine olefin amino acid connected by an all-carbon crosslinker comprising one double bond
  C-term NH2
VTFAHYWAQLAS

SEQ ID NO: 973 - protein, 12 aa, Artificial Sequence
  Description of Artificial Sequence: Synthetic peptide
  N-term Ac
  MOD_RES (4)..(4): Alpha-Me R8-octenyl-alanine olefin amino acid connected by an all-carbon crosslinker comprising one double bond
  misc_feature (4)..(11): Crosslink between residues
  MOD_RES (11)..(11): Alpha-Me S5-pentenyl-alanine olefin amino acid connected by an all-carbon crosslinker comprising one double bond
  C-term NH2
FTFAHYWAQLAS

SEQ ID NO: 974 - protein, 12 aa, Artificial Sequence
  Description of Artificial Sequence: Synthetic peptide
  N-term Ac
  MOD_RES (4)..(4): Alpha-Me R8-octenyl-alanine olefin amino acid connected by an all-carbon crosslinker comprising one double bond
  misc_feature (4)..(11): Crosslink between residues
  MOD_RES (11)..(11): Alpha-Me S5-pentenyl-alanine olefin amino acid connected by an all-carbon crosslinker comprising one double bond
  C-term NH2
WTFAHYWAQLAS

SEQ ID NO: 975 - protein, 12 aa, Artificial Sequence
  Description of Artificial Sequence: Synthetic peptide
  N-term Ac
  MOD_RES (4)..(4): Alpha-Me R8-octenyl-alanine olefin amino acid connected by an all-carbon crosslinker comprising one double bond
  misc_feature (4)..(11): Crosslink between residues
  MOD_RES (11)..(11): Alpha-Me S5-pentenyl-alanine olefin amino acid connected by an all-carbon crosslinker comprising one double bond
  C-term NH2
RTFAHYWAQLAS

SEQ ID NO: 976 - protein, 12 aa, Artificial Sequence
  Description of Artificial Sequence: Synthetic peptide
  N-term Ac
  MOD_RES (4)..(4): Alpha-Me R8-octenyl-alanine olefin amino acid connected by an all-carbon crosslinker comprising one double bond
  misc_feature (4)..(11): Crosslink between residues
  MOD_RES (11)..(11): Alpha-Me S5-pentenyl-alanine olefin amino acid connected by an all-carbon crosslinker comprising one double bond
  C-term NH2
KTFAHYWAQLAS

SEQ ID NO: 977 - protein, 12 aa, Artificial Sequence
  Description of Artificial Sequence: Synthetic peptide
  N-term Ac
  MOD_RES (2)..(2): Norleucine
  MOD_RES (4)..(4): Alpha-Me R8-octenyl-alanine olefin amino acid connected by an all-carbon crosslinker comprising one double bond
  misc_feature (4)..(11): Crosslink between residues
  MOD_RES (11)..(11): Alpha-Me S5-pentenyl-alanine olefin amino acid connected by an all-carbon crosslinker comprising one double bond
  C-term NH2
LLFAHYWAQLAS

SEQ ID NO: 978 - protein, 12 aa, Artificial Sequence
  Description of Artificial Sequence: Synthetic peptide
  N-term Ac
  MOD_RES (4)..(4): Alpha-Me R8-octenyl-alanine olefin amino acid connected by an all-carbon crosslinker comprising one double bond
  misc_feature (4)..(11): Crosslink between residues
  MOD_RES (11)..(11): Alpha-Me S5-pentenyl-alanine olefin amino acid connected by an all-carbon crosslinker comprising one double bond
  C-term NH2
LVFAHYWAQLAS

SEQ ID NO: 979 - protein, 12 aa, Artificial Sequence
  Description of Artificial Sequence: Synthetic peptide
  N-term Ac
  MOD_RES (4)..(4): Alpha-Me R8-octenyl-alanine olefin amino acid connected by an all-carbon crosslinker comprising one double bond
  misc_feature (4)..(11): Crosslink between residues
  MOD_RES (11)..(11): Alpha-Me S5-pentenyl-alanine olefin amino acid connected by an all-carbon crosslinker comprising one double bond
  C-term NH2
LFFAHYWAQLAS

SEQ ID NO: 980 - protein, 12 aa, Artificial Sequence
  Description of Artificial Sequence: Synthetic peptide
  N-term Ac
  MOD_RES (4)..(4): Alpha-Me R8-octenyl-alanine olefin amino acid connected by an all-carbon crosslinker comprising one double bond
  misc_feature (4)..(11): Crosslink between residues
  MOD_RES (11)..(11): Alpha-Me S5-pentenyl-alanine olefin amino acid connected by an all-carbon crosslinker comprising one double bond
  C-term NH2
LWFAHYWAQLAS

SEQ ID NO: 981 - protein, 12 aa, Artificial Sequence
  Description of Artificial Sequence: Synthetic peptide
  N-term Ac
  MOD_RES (4)..(4): Alpha-Me R8-octenyl-alanine olefin amino acid connected by an all-carbon crosslinker comprising one double bond
  misc_feature (4)..(11): Crosslink between residues
  MOD_RES (11)..(11): Alpha-Me S5-pentenyl-alanine olefin amino acid connected by an all-carbon crosslinker comprising one double bond
  C-term NH2
LRFAHYWAQLAS

SEQ ID NO: 982 - protein, 12 aa, Artificial Sequence
  Description of Artificial Sequence: Synthetic peptide
  N-term Ac
  MOD_RES (4)..(4): Alpha-Me R8-octenyl-alanine olefin amino acid connected by an all-carbon crosslinker comprising one double bond
  misc_feature (4)..(11): Crosslink between residues
  MOD_RES (11)..(11): Alpha-Me S5-pentenyl-alanine olefin amino acid connected by an all-carbon crosslinker comprising one double bond
  C-term NH2
LKFAHYWAQLAS

SEQ ID NO: 983 - protein, 12 aa, Artificial Sequence
  Description of Artificial Sequence: Synthetic peptide
  N-term Ac
  MOD_RES (4)..(4): Alpha-Me R8-octenyl-alanine olefin amino acid connected by an all-carbon crosslinker comprising one double bond
  misc_feature (4)..(11): Crosslink between residues
  MOD_RES (5)..(5): Norleucine
  MOD_RES (11)..(11): Alpha-Me S5-pentenyl-alanine olefin amino acid connected by an all-carbon crosslinker comprising one double bond
  C-term NH2
LTFALYWAQLAS

SEQ ID NO: 984 - protein, 12 aa, Artificial Sequence
  Description of Artificial Sequence: Synthetic peptide
  N-term Ac
  MOD_RES (4)..(4): Alpha-Me R8-octenyl-alanine olefin amino acid connected by an all-carbon crosslinker comprising one double bond
  misc_feature (4)..(11): Crosslink between residues
  MOD_RES (11)..(11): Alpha-Me S5-pentenyl-alanine olefin amino acid connected by an all-carbon crosslinker comprising one double bond
  C-term NH2
LTFAVYWAQLAS

SEQ ID NO: 985 - protein, 12 aa, Artificial Sequence
  Description of Artificial Sequence: Synthetic peptide
  N-term Ac
  MOD_RES (4)..(4): Alpha-Me R8-octenyl-alanine olefin amino acid connected by an all-carbon crosslinker comprising one double bond
  misc_feature (4)..(11): Crosslink between residues
  MOD_RES (11)..(11): Alpha-Me S5-pentenyl-alanine olefin amino acid connected by an all-carbon crosslinker comprising one double bond
  C-term NH2
LTFAFYWAQLAS

SEQ ID NO: 986 - protein, 12 aa, Artificial Sequence
  Description of Artificial Sequence: Synthetic peptide
  N-term Ac
  MOD_RES (4)..(4): Alpha-Me R8-octenyl-alanine olefin amino acid connected by an all-carbon crosslinker comprising one double bond
  misc_feature (4)..(11): Crosslink between residues
  MOD_RES (11)..(11): Alpha-Me S5-pentenyl-alanine olefin amino acid connected by an all-carbon crosslinker comprising one double bond
  C-term NH2
LTFAWYWAQLAS

SEQ ID NO: 987 - protein, 12 aa, Artificial Sequence
  Description of Artificial Sequence: Synthetic peptide
  N-term Ac
  MOD_RES (4)..(4): Alpha-Me R8-octenyl-alanine olefin amino acid connected by an all-carbon crosslinker comprising one double bond
  misc_feature (4)..(11): Crosslink between residues
  MOD_RES (11)..(11): Alpha-Me S5-pentenyl-alanine olefin amino acid connected by an all-carbon crosslinker comprising one double bond
  C-term NH2
LTFARYWAQLAS

SEQ ID NO: 988 - protein, 12 aa, Artificial Sequence
  Description of Artificial Sequence: Synthetic peptide
  N-term Ac
  MOD_RES (4)..(4): Alpha-Me R8-octenyl-alanine olefin amino acid connected by an all-carbon crosslinker comprising one double bond
  misc_feature (4)..(11): Crosslink between residues
  MOD_RES (11)..(11): Alpha-Me S5-pentenyl-alanine olefin amino acid connected by an all-carbon crosslinker comprising one double bond
  C-term NH2
LTFAKYWAQLAS

SEQ ID NO: 989 - protein, 12 aa, Artificial Sequence
  Description of Artificial Sequence: Synthetic peptide
  N-term Ac
  MOD_RES (4)..(4): Alpha-Me R8-octenyl-alanine olefin amino acid connected by an all-carbon crosslinker comprising one double bond
  misc_feature (4)..(11): Crosslink between residues
  MOD_RES (6)..(6): Norleucine
  MOD_RES (11)..(11): Alpha-Me S5-pentenyl-alanine olefin amino acid connected by an all-carbon crosslinker comprising one double bond
  C-term NH2
LTFAHLWAQLAS

SEQ ID NO: 990 - protein, 12 aa, Artificial Sequence
  Description of Artificial Sequence: Synthetic peptide
  N-term Ac
  MOD_RES (4)..(4): Alpha-Me R8-octenyl-alanine olefin amino acid connected by an all-carbon crosslinker comprising one double bond
  misc_feature (4)..(11): Crosslink between residues
  MOD_RES (11)..(11): Alpha-Me S5-pentenyl-alanine olefin amino acid connected by an all-carbon crosslinker comprising one double bond
  C-term NH2
LTFAHVWAQLAS

SEQ ID NO: 991 - protein, 12 aa, Artificial Sequence
  Description of Artificial Sequence: Synthetic peptide
  N-term Ac
  MOD_RES (4)..(4): Alpha-Me R8-octenyl-alanine olefin amino acid connected by an all-carbon crosslinker comprising one double bond
  misc_feature (4)..(11): Crosslink between residues
  MOD_RES (11)..(11): Alpha-Me S5-pentenyl-alanine olefin amino acid connected by an all-carbon crosslinker comprising one double bond
  C-term NH2
LTFAHFWAQLAS

SEQ ID NO: 992 - protein, 12 aa, Artificial Sequence
  Description of Artificial Sequence: Synthetic peptide
  N-term Ac
  MOD_RES (4)..(4): Alpha-Me R8-octenyl-alanine olefin amino acid connected by an all-carbon crosslinker comprising one double bond
  misc_feature (4)..(11): Crosslink between residues
  MOD_RES (11)..(11): Alpha-Me S5-pentenyl-alanine olefin amino acid connected by an all-carbon crosslinker comprising one double bond
  C-term NH2
LTFAHWWAQLAS

SEQ ID NO: 993 - protein, 12 aa, Artificial Sequence
  Description of Artificial Sequence: Synthetic peptide
  N-term Ac
  MOD_RES (4)..(4): Alpha-Me R8-octenyl-alanine olefin amino acid connected by an all-carbon crosslinker comprising one double bond
  misc_feature (4)..(11): Crosslink between residues
  MOD_RES (11)..(11): Alpha-Me S5-pentenyl-alanine olefin amino acid connected by an all-carbon crosslinker comprising one double bond
  C-term NH2
LTFAHRWAQLAS

SEQ ID NO: 994 - protein, 12 aa, Artificial Sequence
  Description of Artificial Sequence: Synthetic peptide
  N-term Ac
  MOD_RES (4)..(4): Alpha-Me R8-octenyl-alanine olefin amino acid connected by an all-carbon crosslinker comprising one double bond
  misc_feature (4)..(11): Crosslink between residues
  MOD_RES (11)..(11): Alpha-Me S5-pentenyl-alanine olefin amino acid connected by an all-carbon crosslinker comprising one double bond
  C-term NH2
LTFAHKWAQLAS

SEQ ID NO: 995 - protein, 12 aa, Artificial Sequence
  Description of Artificial Sequence: Synthetic peptide
  N-term Ac
  MOD_RES (4)..(4): Alpha-Me R8-octenyl-alanine olefin amino acid connected by an all-carbon crosslinker comprising one double bond
  misc_feature (4)..(11): Crosslink between residues
  MOD_RES (8)..(8): Norleucine
  MOD_RES (11)..(11): Alpha-Me S5-pentenyl-alanine olefin amino acid connected by an all-carbon crosslinker comprising one double bond
  C-term NH2
LTFAHYWLQLAS

SEQ ID NO: 996 - protein, 12 aa, Artificial Sequence
  Description of Artificial Sequence: Synthetic peptide
  N-term Ac
  MOD_RES (4)..(4): Alpha-Me R8-octenyl-alanine olefin amino acid connected by an all-carbon crosslinker comprising one double bond
  misc_feature (4)..(11): Crosslink between residues
  MOD_RES (11)..(11): Alpha-Me S5-pentenyl-alanine olefin amino acid connected by an all-carbon crosslinker comprising one double bond
  C-term NH2
LTFAHYWVQLAS

SEQ ID NO: 997 - protein, 12 aa, Artificial Sequence
  Description of Artificial Sequence: Synthetic peptide
  N-term Ac
  MOD_RES (4)..(4): Alpha-Me R8-octenyl-alanine olefin amino acid connected by an all-carbon crosslinker comprising one double bond
  misc_feature (4)..(11): Crosslink between residues
  MOD_RES (11)..(11): Alpha-Me S5-pentenyl-alanine olefin amino acid connected by an all-carbon crosslinker comprising one double bond
  C-term NH2
LTFAHYWFQLAS

SEQ ID NO: 998 - protein, 12 aa, Artificial Sequence
  Description of Artificial Sequence: Synthetic peptide
  N-term Ac
  MOD_RES (4)..(4): Alpha-Me R8-octenyl-alanine olefin amino acid connected by an all-carbon crosslinker comprising one double bond
  misc_feature (4)..(11): Crosslink between residues
  MOD_RES (11)..(11): Alpha-Me S5-pentenyl-alanine olefin amino acid connected by an all-carbon crosslinker comprising one double bond
  C-term NH2
LTFAHYWWQLAS

SEQ ID NO: 999 - protein, 12 aa, Artificial Sequence
  Description of Artificial Sequence: Synthetic peptide
  N-term Ac
  MOD_RES (4)..(4): Alpha-Me R8-octenyl-alanine olefin amino acid connected by an all-carbon crosslinker comprising one double bond
  misc_feature (4)..(11): Crosslink between residues
  MOD_RES (11)..(11): Alpha-Me S5-pentenyl-alanine olefin amino acid connected by an all-carbon crosslinker comprising one double bond
  C-term NH2
LTFAHYWKQLAS

SEQ ID NO: 1000 - protein, 12 aa, Artificial Sequence
  Description of Artificial Sequence: Synthetic peptide
  N-term Ac
  MOD_RES (4)..(4): Alpha-Me R8-octenyl-alanine olefin amino acid connected by an all-carbon crosslinker comprising one double bond
  misc_feature (4)..(11): Crosslink between residues
  MOD_RES (9)..(9): Norleucine
  MOD_RES (11)..(11): Alpha-Me S5-pentenyl-alanine olefin amino acid connected by an all-carbon crosslinker comprising one double bond
  C-term NH2
LTFAHYWALLAS

SEQ ID NO: 1001 - protein, 12 aa, Artificial Sequence
  Description of Artificial Sequence: Synthetic peptide
  N-term Ac
  MOD_RES (4)..(4): Alpha-Me R8-octenyl-alanine olefin amino acid connected by an all-carbon crosslinker comprising one double bond
  misc_feature (4)..(11): Crosslink between residues
  MOD_RES (11)..(11): Alpha-Me S5-pentenyl-alanine olefin amino acid connected by an all-carbon crosslinker comprising one double bond
  C-term NH2
LTFAHYWAVLAS

SEQ ID NO: 1002 - protein, 12 aa, Artificial Sequence
  Description of Artificial Sequence: Synthetic peptide
  N-term Ac
  MOD_RES (4)..(4): Alpha-Me R8-octenyl-alanine olefin amino acid connected by an all-carbon crosslinker comprising one double bond
  misc_feature (4)..(11): Crosslink between residues
  MOD_RES (11)..(11): Alpha-Me S5-pentenyl-alanine olefin amino acid connected by an all-carbon crosslinker comprising one double bond
  C-term NH2
LTFAHYWAFLAS

SEQ ID NO: 1003 - protein, 12 aa, Artificial Sequence
  Description of Artificial Sequence: Synthetic peptide
  N-term Ac
  MOD_RES (4)..(4): Alpha-Me R8-octenyl-alanine olefin amino acid connected by an all-carbon crosslinker comprising one double bond
  misc_feature (4)..(11): Crosslink between residues
  MOD_RES (11)..(11): Alpha-Me S5-pentenyl-alanine olefin amino acid connected by an all-carbon crosslinker comprising one double bond
  C-term NH2
LTFAHYWAWLAS

SEQ ID NO: 1004 - protein, 12 aa, Artificial Sequence
  Description of Artificial Sequence: Synthetic peptide
  N-term Ac
  MOD_RES (4)..(4): Alpha-Me R8-octenyl-alanine olefin amino acid connected by an all-carbon crosslinker comprising one double bond
  misc_feature (4)..(11): Crosslink between residues
  MOD_RES (11)..(11): Alpha-Me S5-pentenyl-alanine olefin amino acid connected by an all-carbon crosslinker comprising one double bond
  C-term NH2
LTFAHYWARLAS

SEQ ID NO: 1005 - protein, 12 aa, Artificial Sequence
  Description of Artificial Sequence: Synthetic peptide
  N-term Ac
  MOD_RES (4)..(4): Alpha-Me R8-octenyl-alanine olefin amino acid connected by an all-carbon crosslinker comprising one double bond
  misc_feature (4)..(11): Crosslink between residues
  MOD_RES (11)..(11): Alpha-Me S5-pentenyl-alanine olefin amino acid connected by an all-carbon crosslinker comprising one double bond
  MOD_RES (12)..(12): Norleucine
  C-term NH2
LTFAHYWAQLAL

SEQ ID NO: 1006 - protein, 12 aa, Artificial Sequence
  Description of Artificial Sequence: Synthetic peptide
  N-term Ac
  MOD_RES (4)..(4): Alpha-Me R8-octenyl-alanine olefin amino acid connected by an all-carbon crosslinker comprising one double bond
  misc_feature (4)..(11): Crosslink between residues
  MOD_RES (11)..(11): Alpha-Me S5-pentenyl-alanine olefin amino acid connected by an all-carbon crosslinker comprising one double bond
  C-term NH2
LTFAHYWAQLAV

SEQ ID NO: 1007 - protein, 12 aa, Artificial Sequence
  Description of Artificial Sequence: Synthetic peptide
  N-term Ac
  MOD_RES (4)..(4): Alpha-Me R8-octenyl-alanine olefin amino acid connected by an all-carbon crosslinker comprising one double bond
  misc_feature (4)..(11): Crosslink between residues
  MOD_RES (11)..(11): Alpha-Me S5-pentenyl-alanine olefin amino acid connected by an all-carbon crosslinker comprising one double bond
  C-term NH2
LTFAHYWAQLAF

SEQ ID NO: 1008 - protein, 12 aa, Artificial Sequence
  Description of Artificial Sequence: Synthetic peptide
  N-term Ac
  MOD_RES (4)..(4): Alpha-Me R8-octenyl-alanine olefin amino acid connected by an all-carbon crosslinker comprising one double bond
  misc_feature (4)..(11): Crosslink between residues
  MOD_RES (11)..(11): Alpha-Me S5-pentenyl-alanine olefin amino acid connected by an all-carbon crosslinker comprising one double bond
  C-term NH2
LTFAHYWAQLAW

SEQ ID NO: 1009 - protein, 12 aa, Artificial Sequence
  Description of Artificial Sequence: Synthetic peptide
  N-term Ac
  MOD_RES (4)..(4): Alpha-Me R8-octenyl-alanine olefin amino acid connected by an all-carbon crosslinker comprising one double bond
  misc_feature (4)..(11): Crosslink between residues
  MOD_RES (11)..(11): Alpha-Me S5-pentenyl-alanine olefin amino acid connected by an all-carbon crosslinker comprising one double bond
  C-term NH2
LTFAHYWAQLAR

SEQ ID NO: 1010 - protein, 12 aa, Artificial Sequence
  Description of Artificial Sequence: Synthetic peptide
  N-term Ac
  MOD_RES (4)..(4): Alpha-Me R8-octenyl-alanine olefin amino acid connected by an all-carbon crosslinker comprising one double bond
  misc_feature (4)..(11): Crosslink between residues
  MOD_RES (11)..(11): Alpha-Me S5-pentenyl-alanine olefin amino acid connected by an all-carbon crosslinker comprising one double bond
  C-term NH2
LTFAHYWAQLAK

SEQ ID NO: 1011 - protein, 16 aa, Artificial Sequence
  Description of Artificial Sequence: Synthetic peptide
  N-term Ac
  MOD_RES (2)..(2): Alpha-Me R8-octenyl-alanine olefin amino acid connected by an all-carbon crosslinker comprising one double bond
  misc_feature (2)..(9): Crosslink between residues
  MOD_RES (9)..(9): Alpha-Me S5-pentenyl-alanine olefin amino acid connected by an all-carbon crosslinker comprising one double bond
  MOD_RES (14)..(14): 2-aminoisobutyric acid
  C-term NH2
QAQQTFSNAWRLLXQN

SEQ ID NO: 1012 - protein, 16 aa, Artificial Sequence
  Description of Artificial Sequence: Synthetic peptide
  N-term Ac
  MOD_RES (5)..(5): Alpha-Me R8-octenyl-alanine olefin amino acid connected by an all-carbon crosslinker comprising one double bond
  misc_feature (5)..(12): Crosslink between residues
  MOD_RES (12)..(12): Alpha-Me S5-pentenyl-alanine olefin amino acid connected by an all-carbon crosslinker comprising one double bond
  MOD_RES (14)..(14): 2-aminoisobutyric acid
  C-term NH2
QSQQAFSNLWRALXQN

SEQ ID NO: 1013 - protein, 12 aa, Artificial Sequence
  Description of Artificial Sequence: Synthetic peptide
  N-term Ac
  MOD_RES (3)..(3): 2Pal
  MOD_RES (4)..(4): Alpha-Me R8-octenyl-alanine olefin amino acid connected by an all-carbon crosslinker comprising one double bond
  misc_feature (4)..(11): Crosslink between residues
  MOD_RES (11)..(11): Alpha-Me S5-pentenyl-alanine olefin amino acid connected by an all-carbon crosslinker comprising one double bond
  C-term NH2
LTAAHYWAQLAS

SEQ ID NO: 1014 - protein, 12 aa, Artificial Sequence
  Description of Artificial Sequence: Synthetic peptide
  N-term Ac
  MOD_RES (3)..(3): 3Pal
  MOD_RES (4)..(4): Alpha-Me R8-octenyl-alanine olefin amino acid connected by an all-carbon crosslinker comprising one double bond
  misc_feature (4)..(11): Crosslink between residues
  MOD_RES (11)..(11): Alpha-Me S5-pentenyl-alanine olefin amino acid connected by an all-carbon crosslinker comprising one double bond
  C-term NH2
LTAAHYWAQLAS

SEQ ID NO: 1015 - protein, 12 aa, Artificial Sequence
  Description of Artificial Sequence: Synthetic peptide
  N-term Ac
  MOD_RES (3)..(3): 4Pal
  MOD_RES (4)..(4): Alpha-Me R8-octenyl-alanine olefin amino acid connected by an all-carbon crosslinker comprising one double bond
  misc_feature (4)..(11): Crosslink between residues
  MOD_RES (11)..(11): Alpha-Me S5-pentenyl-alanine olefin amino acid connected by an all-carbon crosslinker comprising one double bond
  C-term NH2
LTAAHYWAQLAS

SEQ ID NO: 1016 - protein, 12 aa, Artificial Sequence
  Description of Artificial Sequence: Synthetic peptide
  N-term Ac
  MOD_RES (3)..(3): Phe-2CF3
  MOD_RES (4)..(4): Alpha-Me R8-octenyl-alanine olefin amino acid connected by an all-carbon crosslinker comprising one double bond
  misc_feature (4)..(11): Crosslink between residues
  MOD_RES (11)..(11): Alpha-Me S5-pentenyl-alanine olefin amino acid connected by an all-carbon crosslinker comprising one double bond
  C-term NH2
LTFAHYWAQLAS

SEQ ID NO: 1017 - protein, 12 aa, Artificial Sequence
  Description of Artificial Sequence: Synthetic peptide
  N-term Ac
  MOD_RES (3)..(3): Phe-2CN
  MOD_RES (4)..(4): Alpha-Me R8-octenyl-alanine olefin amino acid connected by an all-carbon crosslinker comprising one double bond
  misc_feature (4)..(11): Crosslink between residues
  MOD_RES (11)..(11): Alpha-Me S5-pentenyl-alanine olefin amino acid connected by an all-carbon crosslinker comprising one double bond
  C-term NH2
LTFAHYWAQLAS

SEQ ID NO: 1018 - protein, 12 aa, Artificial Sequence
  Description of Artificial Sequence: Synthetic peptide
  N-term Ac
  MOD_RES (3)..(3): Phe-2Me
  MOD_RES (4)..(4): Alpha-Me R8-octenyl-alanine olefin amino acid connected by an all-carbon crosslinker comprising one double bond
  misc_feature (4)..(11): Crosslink between residues
  MOD_RES (11)..(11): Alpha-Me S5-pentenyl-alanine olefin amino acid connected by an all-carbon crosslinker comprising one double bond
  C-term NH2
LTFAHYWAQLAS

SEQ ID NO: 1019 - protein, 12 aa, Artificial Sequence
  Description of Artificial Sequence: Synthetic peptide
  N-term Ac
  MOD_RES (3)..(3): 3-Chloro-Phe
  MOD_RES (4)..(4): Alpha-Me R8-octenyl-alanine olefin amino acid connected by an all-carbon crosslinker comprising one double bond
  misc_feature (4)..(11): Crosslink between residues
  MOD_RES (11)..(11): Alpha-Me S5-pentenyl-alanine olefin amino acid connected by an all-carbon crosslinker comprising one double bond
  C-term NH2
LTFAHYWAQLAS

SEQ ID NO: 1020 - protein, 12 aa, Artificial Sequence
  Description of Artificial Sequence: Synthetic peptide
  N-term Ac
  MOD_RES (3)..(3): D-Phe-4CF3
  MOD_RES (4)..(4): Alpha-Me R8-octenyl-alanine olefin amino acid connected by an all-carbon crosslinker comprising one double bond
  misc_feature (4)..(11): Crosslink between residues
  MOD_RES (11)..(11): Alpha-Me S5-pentenyl-alanine olefin amino acid connected by an all-carbon crosslinker comprising one double bond
  C-term NH2
LTFAHYWAQLAS

SEQ ID NO: 1021 - protein, 12 aa, Artificial Sequence
  Description of Artificial Sequence: Synthetic peptide
  N-term Ac
  MOD_RES (3)..(3): Phe-4tBu
  MOD_RES (4)..(4): Alpha-Me R8-octenyl-alanine olefin amino acid connected by an all-carbon crosslinker comprising one double bond
  misc_feature (4)..(11): Crosslink between residues
  MOD_RES (11)..(11): Alpha-Me S5-pentenyl-alanine olefin amino acid connected by an all-carbon crosslinker comprising one double bond
  C-term NH2
LTFAHYWAQLAS

SEQ ID NO: 1022 - protein, 12 aa, Artificial Sequence
  Description of Artificial Sequence: Synthetic peptide
  N-term Ac
  MOD_RES (3)..(3): Phe-5F
  MOD_RES (4)..(4): Alpha-Me R8-octenyl-alanine olefin amino acid connected by an all-carbon crosslinker comprising one double bond
  misc_feature (4)..(11): Crosslink between residues
  MOD_RES (11)..(11): Alpha-Me S5-pentenyl-alanine olefin amino acid connected by an all-carbon crosslinker comprising one double bond
  C-term NH2
LTFAHYWAQLAS

SEQ ID NO: 1023 - protein, 13 aa, Artificial Sequence
  Description of Artificial Sequence: Synthetic peptide
  N-term Ac
  MOD_RES (4)..(4): Alpha-Me R8-octenyl-alanine olefin amino acid connected by an all-carbon crosslinker comprising one double bond
  misc_feature (4)..(12): Crosslink between residues
  MOD_RES (7)..(7): 3Bth
  MOD_RES (12)..(12): Alpha-Me S5-pentenyl-alanine olefin amino acid connected by an all-carbon crosslinker comprising one double bond
  C-term NH2
LTFAHYXAAQLAS

SEQ ID NO: 1024 - protein, 12 aa, Artificial Sequence
  Description of Artificial Sequence: Synthetic peptide
  N-term Ac
  MOD_RES (3)..(3): Phe-2Br
  MOD_RES (4)..(4): Alpha-Me R8-octenyl-alanine olefin amino acid connected by an all-carbon crosslinker comprising one double bond
  misc_feature (4)..(11): Crosslink between residues
  MOD_RES (11)..(11): Alpha-Me S5-pentenyl-alanine olefin amino acid connected by an all-carbon crosslinker comprising one double bond
  C-term NH2
LTFAHYWAQLAS

SEQ ID NO: 1025 - protein, 12 aa, Artificial Sequence
  Description of Artificial Sequence: Synthetic peptide
  N-term Ac
  MOD_RES (3)..(3): Phe-4Br
  MOD_RES (4)..(4): Alpha-Me R8-octenyl-alanine olefin amino acid connected by an all-carbon crosslinker comprising one double bond
  misc_feature (4)..(11): Crosslink between residues
  MOD_RES (11)..(11): Alpha-Me S5-pentenyl-alanine olefin amino acid connected by an all-carbon crosslinker comprising one double bond
  C-term NH2
LTFAHYWAQLAS

SEQ ID NO: 1026 - protein, 12 aa, Artificial Sequence
  Description of Artificial Sequence: Synthetic peptide
  N-term Ac
  MOD_RES (3)..(3): Phe-2Cl
  MOD_RES (4)..(4): Alpha-Me R8-octenyl-alanine olefin amino acid connected by an all-carbon crosslinker comprising one double bond
  misc_feature (4)..(11): Crosslink between residues
  MOD_RES (11)..(11): Alpha-Me S5-pentenyl-alanine olefin amino acid connected by an all-carbon crosslinker comprising one double bond
  C-term NH2
LTFAHYWAQLAS

SEQ ID NO: 1027 - protein, 12 aa, Artificial Sequence
  Description of Artificial Sequence: Synthetic peptide
  N-term Ac
  MOD_RES (3)..(3): Phe-4Cl
  MOD_RES (4)..(4): Alpha-Me R8-octenyl-alanine olefin amino acid connected by an all-carbon crosslinker comprising one double bond
  misc_feature (4)..(11): Crosslink between residues
  MOD_RES (11)..(11): Alpha-Me S5-pentenyl-alanine olefin amino acid connected by an all-carbon crosslinker comprising one double bond
  C-term NH2
LTFAHYWAQLAS

SEQ ID NO: 1028 - protein, 12 aa, Artificial Sequence
  Description of Artificial Sequence: Synthetic peptide
  N-term Ac
  MOD_RES (3)..(3): Phe-3CN
  MOD_RES (4)..(4): Alpha-Me R8-octenyl-alanine olefin amino acid connected by an all-carbon crosslinker comprising one double bond
  misc_feature (4)..(11): Crosslink between residues
  MOD_RES (11)..(11): Alpha-Me S5-pentenyl-alanine olefin amino acid connected by an all-carbon crosslinker comprising one double bond
  C-term NH2
LTFAHYWAQLAS

SEQ ID NO: 1029 - protein, 12 aa, Artificial Sequence
  Description of Artificial Sequence: Synthetic peptide
  N-term Ac
  MOD_RES (3)..(3): Phe-4CN
  MOD_RES (4)..(4): Alpha-Me R8-octenyl-alanine olefin amino acid connected by an all-carbon crosslinker comprising one double bond
  misc_feature (4)..(11): Crosslink between residues
  MOD_RES (11)..(11): Alpha-Me S5-pentenyl-alanine olefin amino acid connected by an all-carbon crosslinker comprising one double bond
  C-term NH2
LTFAHYWAQLAS

SEQ ID NO: 1030 - protein, 12 aa, Artificial Sequence
  Description of Artificial Sequence: Synthetic peptide
  N-term Ac
  MOD_RES (3)..(3): Phe-34Cl2
  MOD_RES (4)..(4): Alpha-Me R8-octenyl-alanine olefin amino acid connected by an all-carbon crosslinker comprising one double bond
  misc_feature (4)..(11): Crosslink between residues
  MOD_RES (11)..(11): Alpha-Me S5-pentenyl-alanine olefin amino acid connected by an all-carbon crosslinker comprising one double bond
  C-term NH2
LTFAHYWAQLAS

SEQ ID NO: 1031 - protein, 12 aa, Artificial Sequence
  Description of Artificial Sequence: Synthetic peptide
  N-term Ac
  MOD_RES (3)..(3): 3,4-difluoro Phe
  MOD_RES (4)..(4): Alpha-Me R8-octenyl-alanine olefin amino acid connected by an all-carbon crosslinker comprising one double bond
  misc_feature (4)..(11): Crosslink between residues
  MOD_RES (11)..(11): Alpha-Me S5-pentenyl-alanine olefin amino acid connected by an all-carbon crosslinker comprising one double bond
  C-term NH2
LTFAHYWAQLAS

SEQ ID NO: 1032 - protein, 12 aa, Artificial Sequence
  Description of Artificial Sequence: Synthetic peptide
  N-term Ac
  MOD_RES (3)..(3): 3,5-difluoro-Phe
  MOD_RES (4)..(4): Alpha-Me R8-octenyl-alanine olefin amino acid connected by an all-carbon crosslinker comprising one double bond
  misc_feature (4)..(11): Crosslink between residues
  MOD_RES (11)..(11): Alpha-Me S5-pentenyl-alanine olefin amino acid connected by an all-carbon crosslinker comprising one double bond
  C-term NH2
LTFAHYWAQLAS

SEQ ID NO: 1033 - protein, 12 aa, Artificial Sequence
  Description of Artificial Sequence: Synthetic peptide
  N-term Ac
  MOD_RES (3)..(3): 3,3-di-Phe
  MOD_RES (4)..(4): Alpha-Me R8-octenyl-alanine olefin amino acid connected by an all-carbon crosslinker comprising one double bond
  misc_feature (4)..(11): Crosslink between residues
  MOD_RES (11)..(11): Alpha-Me S5-pentenyl-alanine olefin amino acid connected by an all-carbon crosslinker comprising one double bond
  C-term NH2
LTFAHYWAQLAS

SEQ ID NO: 1034 - protein, 12 aa, Artificial Sequence
  Description of Artificial Sequence: Synthetic peptide
  N-term Ac
  MOD_RES (3)..(3): 2-Fluoro-Phe
  MOD_RES (4)..(4): Alpha-Me R8-octenyl-alanine olefin amino acid connected by an all-carbon crosslinker comprising one double bond
  misc_feature (4)..(11): Crosslink between residues
  MOD_RES (11)..(11): Alpha-Me S5-pentenyl-alanine olefin amino acid connected by an all-carbon crosslinker comprising one double bond
  C-term NH2
LTFAHYWAQLAS

SEQ ID NO: 1035 - protein, 12 aa, Artificial Sequence
  Description of Artificial Sequence: Synthetic peptide
  N-term Ac
  MOD_RES (3)..(3): 3-fluoro-Phe
  MOD_RES (4)..(4): Alpha-Me R8-octenyl-alanine olefin amino acid connected by an all-carbon crosslinker comprising one double bond
  misc_feature (4)..(11): Crosslink between residues
  MOD_RES (11)..(11): Alpha-Me S5-pentenyl-alanine olefin amino acid connected by an all-carbon crosslinker comprising one double bond
  C-term NH2
LTFAHYWAQLAS

SEQ ID NO: 1036 - protein, 12 aa, Artificial Sequence
  Description of Artificial Sequence: Synthetic peptide
  N-term Ac
  MOD_RES (3)..(3): Phe-4F
  MOD_RES (4)..(4): Alpha-Me R8-octenyl-alanine olefin amino acid connected by an all-carbon crosslinker comprising one double bond
  misc_feature (4)..(11): Crosslink between residues
  MOD_RES (11)..(11): Alpha-Me S5-pentenyl-alanine olefin amino acid connected by an all-carbon crosslinker comprising one double bond
  C-term NH2
LTFAHYWAQLAS

SEQ ID NO: 1037 - protein, 12 aa, Artificial Sequence
  Description of Artificial Sequence: Synthetic peptide
  N-term Ac
  MOD_RES (3)..(3): 4-iodo-Phe
  MOD_RES (4)..(4): Alpha-Me R8-octenyl-alanine olefin amino acid connected by an all-carbon crosslinker comprising one double bond
  misc_feature (4)..(11): Crosslink between residues
  MOD_RES (11)..(11): Alpha-Me S5-pentenyl-alanine olefin amino acid connected by an all-carbon crosslinker comprising one double bond
  C-term NH2
LTFAHYWAQLAS

SEQ ID NO: 1038 - protein, 12 aa, Artificial Sequence
  Description of Artificial Sequence: Synthetic peptide
  N-term Ac
  MOD_RES (3)..(3): Phe-3Me
  MOD_RES (4)..(4): Alpha-Me R8-octenyl-alanine olefin amino acid connected by an all-carbon crosslinker comprising one double bond
  misc_feature (4)..(11): Crosslink between residues
  MOD_RES (11)..(11): Alpha-Me S5-pentenyl-alanine olefin amino acid connected by an all-carbon crosslinker comprising one double bond
  C-term NH2
LTFAHYWAQLAS

SEQ ID NO: 1039 - protein, 12 aa, Artificial Sequence
  Description of Artificial Sequence: Synthetic peptide
  N-term Ac
  MOD_RES (3)..(3): Phe-4Me
  MOD_RES (4)..(4): Alpha-Me R8-octenyl-alanine olefin amino acid connected by an all-carbon crosslinker comprising one double bond
  misc_feature (4)..(11): Crosslink between residues
  MOD_RES (11)..(11): Alpha-Me S5-pentenyl-alanine olefin amino acid connected by an all-carbon crosslinker comprising one double bond
  C-term NH2
LTFAHYWAQLAS

SEQ ID NO: 1040 - protein, 12 aa, Artificial Sequence
  Description of Artificial Sequence: Synthetic peptide
  N-term Ac
  MOD_RES (3)..(3): 1-Naphthalanine
  MOD_RES (4)..(4): Alpha-Me R8-octenyl-alanine olefin amino acid connected by an all-carbon crosslinker comprising one double bond
  misc_feature (4)..(11): Crosslink between residues
  MOD_RES (11)..(11): Alpha-Me S5-pentenyl-alanine olefin amino acid connected by an all-carbon crosslinker comprising one double bond
  C-term NH2
LTAAHYWAQLAS

SEQ ID NO: 1041 - protein, 12 aa, Artificial Sequence
  Description of Artificial Sequence: Synthetic peptide
  N-term Ac
  MOD_RES (3)..(3): 2-Naphthalanine
  MOD_RES (4)..(4): Alpha-Me R8-octenyl-alanine olefin amino acid connected by an all-carbon crosslinker comprising one double bond
  misc_feature (4)..(11): Crosslink between residues
  MOD_RES (11)..(11): Alpha-Me S5-pentenyl-alanine olefin amino acid connected by an all-carbon crosslinker comprising one double bond
  C-term NH2
LTAAHYWAQLAS

SEQ ID NO: 1042 - protein, 12 aa, Artificial Sequence
  Description of Artificial Sequence: Synthetic peptide
  N-term Ac
  MOD_RES (3)..(3): Phe-3CF3
  MOD_RES (4)..(4): Alpha-Me R8-octenyl-alanine olefin amino acid connected by an all-carbon crosslinker comprising one double bond
  misc_feature (4)..(11): Crosslink between residues
  MOD_RES (11)..(11): Alpha-Me S5-pentenyl-alanine olefin amino acid connected by an all-carbon crosslinker comprising one double bond
  C-term NH2
LTFAHYWAQLAS

SEQ ID NO: 1043 - protein, 12 aa, Artificial Sequence
  Description of Artificial Sequence: Synthetic peptide
  N-term Ac
  MOD_RES (3)..(3): Phe-4NO2
  MOD_RES (4)..(4): Alpha-Me R8-octenyl-alanine olefin amino acid connected by an all-carbon crosslinker comprising one double bond
  misc_feature (4)..(11): Crosslink between residues
  MOD_RES (11)..(11): Alpha-Me S5-pentenyl-alanine olefin amino acid connected by an all-carbon crosslinker comprising one double bond
  C-term NH2
LTFAHYWAQLAS

SEQ ID NO: 1044 - protein, 12 aa, Artificial Sequence
  Description of Artificial Sequence: Synthetic peptide
  N-term Ac
  MOD_RES (3)..(3): Phe-3NO2
  MOD_RES (4)..(4): Alpha-Me R8-octenyl-alanine olefin amino acid connected by an all-carbon crosslinker comprising one double bond
  misc_feature (4)..(11): Crosslink between residues
  MOD_RES (11)..(11): Alpha-Me S5-pentenyl-alanine olefin amino acid connected by an all-carbon crosslinker comprising one double bond
  C-term NH2
LTFAHYWAQLAS

SEQ ID NO: 1045 - protein, 12 aa, Artificial Sequence
  Description of Artificial Sequence: Synthetic peptide
  N-term Ac
  MOD_RES (4)..(4): Alpha-Me R8-octenyl-alanine olefin amino acid connected by an all-carbon crosslinker comprising one double bond
  misc_feature (4)..(11): Crosslink between residues
  MOD_RES (5)..(5): 2Thi
  MOD_RES (11)..(11): Alpha-Me S5-pentenyl-alanine olefin amino acid connected by an all-carbon crosslinker comprising one double bond
  C-term NH2
LTFAXYWAQLAS

SEQ ID NO: 1046 - protein, 12 aa, Artificial Sequence
  Description of Artificial Sequence: Synthetic peptide
  N-term Ac
  MOD_RES (4)..(4): Alpha-Me R8-octenyl-alanine olefin amino acid connected by an all-carbon crosslinker comprising one double bond
  misc_feature (4)..(11): Crosslink between residues
  MOD_RES (6)..(6): Bi-Phe
  MOD_RES (11)..(11): Alpha-Me S5-pentenyl-alanine olefin amino acid connected by an all-carbon crosslinker comprising one double bond
  C-term NH2
LTFAHFWAQLAS

SEQ ID NO: 1047 - protein, 12 aa, Artificial Sequence
  Description of Artificial Sequence: Synthetic peptide
  N-term Ac
  MOD_RES (4)..(4): Alpha-Me R8-octenyl-alanine olefin amino acid connected by an all-carbon crosslinker comprising one double bond
  misc_feature (4)..(11): Crosslink between residues
  MOD_RES (6)..(6): Phe-4tBu
  MOD_RES (11)..(11): Alpha-Me S5-pentenyl-alanine olefin amino acid connected by an all-carbon crosslinker comprising one double bond
  C-term NH2
LTFAHFWAQLAS

SEQ ID NO: 1048 - protein, 12 aa, Artificial Sequence
  Description of Artificial Sequence: Synthetic peptide
  N-term Ac
  MOD_RES (4)..(4): Alpha-Me R8-octenyl-alanine olefin amino acid connected by an all-carbon crosslinker comprising one double bond
  misc_feature (4)..(11): Crosslink between residues
  MOD_RES (6)..(6): D-Phe-4CF3
  MOD_RES (11)..(11): Alpha-Me S5-pentenyl-alanine olefin amino acid connected by an all-carbon crosslinker comprising one double bond
  C-term NH2
LTFAHFWAQLAS

SEQ ID NO: 1049 - protein, 12 aa, Artificial Sequence
  Description of Artificial Sequence: Synthetic peptide
  N-term Ac
  MOD_RES (4)..(4): Alpha-Me R8-octenyl-alanine olefin amino acid connected by an all-carbon crosslinker comprising one double bond
  misc_feature (4)..(11): Crosslink between residues
  MOD_RES (6)..(6): Phe-4Cl
  MOD_RES (11)..(11): Alpha-Me S5-pentenyl-alanine olefin amino acid connected by an all-carbon crosslinker comprising one double bond
  C-term NH2
LTFAHFWAQLAS

SEQ ID NO: 1050 - protein, 12 aa, Artificial Sequence
  Description of Artificial Sequence: Synthetic peptide
  N-term Ac
  MOD_RES (4)..(4): Alpha-Me R8-octenyl-alanine olefin amino acid connected by an all-carbon crosslinker comprising one double bond
  misc_feature (4)..(11): Crosslink between residues
  MOD_RES (6)..(6): Phe-4Me
  MOD_RES (11)..(11): Alpha-Me S5-pentenyl-alanine olefin amino acid connected by an all-carbon crosslinker comprising one double bond
  C-term NH2
LTFAHFWAQLAS

SEQ ID NO: 1051 - protein, 12 aa, Artificial Sequence
  Description of Artificial Sequence: Synthetic peptide
  N-term Ac
  MOD_RES (4)..(4): Alpha-Me R8-octenyl-alanine olefin amino acid connected by an all-carbon crosslinker comprising one double bond
  misc_feature (4)..(11): Crosslink between residues
  MOD_RES (6)..(6): Phe-4Br
  MOD_RES (11)..(11): Alpha-Me S5-pentenyl-alanine olefin amino acid connected by an all-carbon crosslinker comprising one double bond
  C-term NH2
LTFAHFWAQLAS

SEQ ID NO: 1052 - protein, 12 aa, Artificial Sequence
  Description of Artificial Sequence: Synthetic peptide
  N-term Ac
  MOD_RES (4)..(4): Alpha-Me R8-octenyl-alanine olefin amino acid connected by an all-carbon crosslinker comprising one double bond
  misc_feature (4)..(11): Crosslink between residues
  MOD_RES (6)..(6): Phe-4CN
  MOD_RES (11)..(11): Alpha-Me S5-pentenyl-alanine olefin amino acid connected by an all-carbon crosslinker comprising one double bond
  C-term NH2
LTFAHFWAQLAS

SEQ ID NO: 1053 - protein, 12 aa, Artificial Sequence
  Description of Artificial Sequence: Synthetic peptide
  N-term Ac
  MOD_RES (4)..(4): Alpha-Me R8-octenyl-alanine olefin amino acid connected by an all-carbon crosslinker comprising one double bond
  misc_feature (4)..(11): Crosslink between residues
  MOD_RES (6)..(6): Phe-4NO2
  MOD_RES (11)..(11): Alpha-Me S5-pentenyl-alanine olefin amino acid connected by an all-carbon crosslinker comprising one double bond
  C-term NH2
LTFAHFWAQLAS

SEQ ID NO: 1054 - protein, 12 aa, Artificial Sequence
  Description of Artificial Sequence: Synthetic peptide
  N-term Ac
  MOD_RES (4)..(4): Alpha-Me R8-octenyl-alanine olefin amino acid connected by an all-carbon crosslinker comprising one double bond
  misc_feature (4)..(11): Crosslink between residues
  MOD_RES (6)..(6): 1-Naphthalanine
  MOD_RES (11)..(11): Alpha-Me S5-pentenyl-alanine olefin amino acid connected by an all-carbon crosslinker comprising one double bond
  C-term NH2
LTFAHAWAQLAS

SEQ ID NO: 1055 - protein, 12 aa, Artificial Sequence
  Description of Artificial Sequence: Synthetic peptide
  N-term Ac
  MOD_RES (4)..(4): Alpha-Me R8-octenyl-alanine olefin amino acid connected by an all-carbon crosslinker comprising one double bond
  misc_feature (4)..(11): Crosslink between residues
  MOD_RES (6)..(6): 2-Naphthalanine
  MOD_RES (11)..(11): Alpha-Me S5-pentenyl-alanine olefin amino acid connected by an all-carbon crosslinker comprising one double bond
  C-term NH2
LTFAHAWAQLAS

SEQ ID NO: 1056 - protein, 11 aa, Artificial Sequence
  Description of Artificial Sequence: Synthetic peptide
  N-term Ac
  MOD_RES (4)..(4): Alpha-Me R8-octenyl-alanine olefin amino acid connected by an all-carbon crosslinker comprising one double bond
  misc_feature (4)..(10): Crosslink between residues
  MOD_RES (10)..(10): Alpha-Me S5-pentenyl-alanine olefin amino acid connected by an all-carbon crosslinker comprising one double bond
  C-term NH2
LTFAHWAQLAS

SEQ ID NO: 1057 - protein, 12 aa, Artificial Sequence
  Description of Artificial Sequence: Synthetic peptide
  N-term Ac
  MOD_RES (4)..(4): Alpha-Me R8-octenyl-alanine olefin amino acid connected by an all-carbon crosslinker comprising one double bond
  misc_feature (4)..(11): Crosslink between residues
  MOD_RES (7)..(7): 1-Naphthalanine
  MOD_RES (11)..(11): Alpha-Me S5-pentenyl-alanine olefin amino acid connected by an all-carbon crosslinker comprising one double bond
  C-term NH2
LTFAHYAAQLAS

SEQ ID NO: 1058 - protein, 12 aa, Artificial Sequence
  Description of Artificial Sequence: Synthetic peptide
  N-term Ac
  MOD_RES (4)..(4): Alpha-Me R8-octenyl-alanine olefin amino acid connected by an all-carbon crosslinker comprising one double bond
  misc_feature (4)..(11): Crosslink between residues
  MOD_RES (7)..(7): 2-Naphthalanine
  MOD_RES (11)..(11): Alpha-Me S5-pentenyl-alanine olefin amino acid connected by an all-carbon crosslinker comprising one double bond
  C-term NH2
LTFAHYAAQLAS

SEQ ID NO: 1059 - protein, 12 aa, Artificial Sequence
  Description of Artificial Sequence: Synthetic peptide
  N-term Ac
  MOD_RES (4)..(4): Alpha-Me R8-octenyl-alanine olefin amino acid connected by an all-carbon crosslinker comprising one double bond
  misc_feature (4)..(11): Crosslink between residues
  MOD_RES (11)..(11): Alpha-Me S5-pentenyl-alanine olefin amino acid connected by an all-carbon crosslinker comprising one double bond
  C-term NH2
LTFAHYWAQIAS

SEQ ID NO: 1060 - protein, 12 aa, Artificial Sequence
  Description of Artificial Sequence: Synthetic peptide
  N-term Ac
  MOD_RES (4)..(4): Alpha-Me R8-octenyl-alanine olefin amino acid connected by an all-carbon crosslinker comprising one double bond
  misc_feature (4)..(11): Crosslink between residues
  MOD_RES (10)..(10): Norleucine
  MOD_RES (11)..(11): Alpha-Me S5-pentenyl-alanine olefin amino acid connected by an all-carbon crosslinker comprising one double bond
  C-term NH2
LTFAHYWAQLAS

SEQ ID NO: 1061 - protein, 12 aa, Artificial Sequence
  Description of Artificial Sequence: Synthetic peptide
  N-term Ac
  MOD_RES (4)..(4): Alpha-Me R8-octenyl-alanine olefin amino acid connected by an all-carbon crosslinker comprising one E configured double bond
  misc_feature (4)..(11): Crosslink between residues
  MOD_RES (11)..(11): Alpha-Me S5-pentenyl-alanine olefin amino acid connected by an all-carbon crosslinker comprising one E configured double bond
  C-term NH2
LTFAHYWAQLAA

SEQ ID NO: 1062 - protein, 12 aa, Artificial Sequence
  Description of Artificial Sequence: Synthetic peptide
  N-term Ac
  MOD_RES (4)..(4): Alpha-Me R8-octenyl-alanine olefin amino acid connected by an all-carbon crosslinker comprising one double bond
  misc_feature (4)..(11): Crosslink between residues
  MOD_RES (11)..(11): Alpha-Me S5-pentenyl-alanine olefin amino acid connected by an all-carbon crosslinker comprising one double bond
  MOD_RES (12)..(12): Abu
  C-term NH2
LTFAHYWAQLAX

SEQ ID NO: 1063 - protein, 12 aa, Artificial Sequence
  Description of Artificial Sequence: Synthetic peptide
  N-term Ac
  MOD_RES (4)..(4): Alpha-Me R8-octenyl-alanine olefin amino acid connected by an all-carbon crosslinker comprising one double bond
  misc_feature (4)..(11): Crosslink between residues
  MOD_RES (8)..(8): Abu
  MOD_RES (11)..(11): Alpha-Me S5-pentenyl-alanine olefin amino acid connected by an all-carbon crosslinker comprising one double bond
  C-term NH2
LTFAHYWXQLAS

SEQ ID NO: 1064 - protein, 12 aa, Artificial Sequence
  Description of Artificial Sequence: Synthetic peptide
  N-term Ac
  MOD_RES (4)..(4): Alpha-Me R8-octenyl-alanine olefin amino acid connected by an all-carbon crosslinker comprising one double bond
  misc_feature (4)..(11): Crosslink between residues
  MOD_RES (11)..(11): Alpha-Me S5-pentenyl-alanine olefin amino acid connected by an all-carbon crosslinker comprising one double bond
  C-term NH2
LAFAHYWAQLAS

SEQ ID NO: 1065 - protein, 12 aa, Artificial Sequence
  Description of Artificial Sequence: Synthetic peptide
  N-term Ac
  MOD_RES (4)..(4): Alpha-Me R8-octenyl-alanine olefin amino acid connected by an all-carbon crosslinker comprising one double bond
  misc_feature (4)..(11): Crosslink between residues
  MOD_RES (9)..(9): Norleucine
  MOD_RES (11)..(11): Alpha-Me S5-pentenyl-alanine olefin amino acid connected by an all-carbon crosslinker comprising one double bond
  C-term NH2
LTFANLWALLAQ

SEQ ID NO: 1066 - protein, 12 aa, Artificial Sequence
  Description of Artificial Sequence: Synthetic peptide
  N-term Ac
  MOD_RES (4)..(4): Alpha-Me R8-octenyl-alanine olefin amino acid connected by an all-carbon crosslinker comprising one double bond
  misc_feature (4)..(11): Crosslink between residues
  MOD_RES (9)..(9): Norleucine
  MOD_RES (11)..(11): Alpha-Me S5-pentenyl-alanine olefin amino acid connected by an all-carbon crosslinker comprising one double bond
  C-term NH2
LTFAALWALLAQ

SEQ ID NO: 1067 - protein, 12 aa, Artificial Sequence
  Description of Artificial Sequence: Synthetic peptide
  N-term Ac
  MOD_RES (4)..(4): Alpha-Me R8-octenyl-alanine olefin amino acid connected by an all-carbon crosslinker comprising one double bond
  misc_feature (4)..(11): Crosslink between residues
  MOD_RES (9)..(9): Norleucine
  MOD_RES (11)..(11): Alpha-Me S5-pentenyl-alanine olefin amino acid connected by an all-carbon crosslinker comprising one double bond
  C-term NH2
LAFANLWALLAQ

SEQ ID NO: 1068 - protein, 10 aa, Artificial Sequence
  Description of Artificial Sequence: Synthetic peptide
  N-term Ac
  MOD_RES (2)..(2): Alpha-Me R8-octenyl-alanine olefin amino acid connected by an all-carbon crosslinker comprising one double bond
  misc_feature (2)..(9): Crosslink between residues
  MOD_RES (7)..(7): Ac3c
  MOD_RES (9)..(9): Alpha-Me S5-pentenyl-alanine olefin amino acid connected by an all-carbon crosslinker comprising one double bond
  C-term NH2
FAAYWAXLAA

SEQ ID NO: 1069 - protein, 12 aa, Artificial Sequence
  Description of Artificial Sequence: Synthetic peptide
  N-term Ac
  MOD_RES (4)..(4): Alpha-Me R8-octenyl-alanine olefin amino acid connected by an all-carbon crosslinker comprising one double bond
  misc_feature (4)..(11): Crosslink between residues
  MOD_RES (11)..(11): Alpha-Me S5-pentenyl-alanine olefin amino acid connected by an all-carbon crosslinker comprising one double bond
  C-term NH2
LTFAAYWAALAS

SEQ ID NO: 1070 - protein, 12 aa, Artificial Sequence
  Description of Artificial Sequence: Synthetic peptide
  N-term Ac
  MOD_RES (4)..(4): Alpha-Me R8-octenyl-alanine olefin amino acid connected by an all-carbon crosslinker comprising one double bond
  misc_feature (4)..(11): Crosslink between residues
  MOD_RES (11)..(11): Alpha-Me S5-pentenyl-alanine olefin amino acid connected by an all-carbon crosslinker comprising one double bond
  C-term NH2
LVFAAYWAQLAS

SEQ ID NO: 1071 - protein, 12 aa, Artificial Sequence
  Description of Artificial Sequence: Synthetic peptide
  N-term Ac
  MOD_RES (4)..(4): Alpha-Me R8-octenyl-alanine olefin amino acid connected by an all-carbon crosslinker comprising one double bond
  misc_feature (4)..(11): Crosslink between residues
  MOD_RES (8)..(8): Abu
  MOD_RES (11)..(11): Alpha-Me S5-pentenyl-alanine olefin amino acid connected by an all-carbon crosslinker comprising one double bond
  C-term NH2
LTFAAYWXQLAS

SEQ ID NO: 1072 - protein, 12 aa, Artificial Sequence
  Description of Artificial Sequence: Synthetic peptide
  N-term Ac
  MOD_RES (4)..(4): Alpha-Me R8-octenyl-alanine olefin amino acid connected by an all-carbon crosslinker comprising one double bond
  misc_feature (4)..(11): Crosslink between residues
  MOD_RES (8)..(8): Norleucine
  MOD_RES (11)..(11): Alpha-Me S5-pentenyl-alanine olefin amino acid connected by an all-carbon crosslinker comprising one double bond
  C-term NH2
LTFAAYWLQLAS

SEQ ID NO: 1073 - protein, 12 aa, Artificial Sequence
  Description of Artificial Sequence: Synthetic peptide
  N-term Ac
  MOD_RES (4)..(4): Alpha-Me R8-octenyl-alanine olefin amino acid connected by an all-carbon crosslinker comprising one double bond
  misc_feature (4)..(11): Crosslink between residues
  MOD_RES (5)..(5): Abu
  MOD_RES (11)..(11): Alpha-Me S5-pentenyl-alanine olefin amino acid connected by an all-carbon crosslinker comprising one double bond
  C-term NH2
LTFAXYWAQLAS

SEQ ID NO: 1074 - protein, 12 aa, Artificial Sequence
  Description of Artificial Sequence: Synthetic peptide
  N-term Ac
  MOD_RES (4)..(4): Alpha-Me R8-octenyl-alanine olefin amino acid connected by an all-carbon crosslinker comprising one double bond
  misc_feature (4)..(11): Crosslink between residues
  MOD_RES (11)..(11): Alpha-Me S5-pentenyl-alanine olefin amino acid connected by an all-carbon crosslinker comprising one double bond
  C-term NH2
LTFAAYWHQLAS

SEQ ID NO: 1075 - protein, 12 aa, Artificial Sequence
  Description of Artificial Sequence: Synthetic peptide
  N-term Ac
  MOD_RES (4)..(4): Alpha-Me R8-octenyl-alanine olefin amino acid connected by an all-carbon crosslinker comprising one double bond
  misc_feature (4)..(11): Crosslink between residues
  MOD_RES (11)..(11): Alpha-Me S5-pentenyl-alanine olefin amino acid connected by an all-carbon crosslinker comprising one double bond
  C-term NH2
LTFAAYWKQLAS

SEQ ID NO: 1076 - protein, 12 aa, Artificial Sequence
  Description of Artificial Sequence: Synthetic peptide
  N-term Ac
  MOD_RES (4)..(4): Alpha-Me R8-octenyl-alanine olefin amino acid connected by an all-carbon crosslinker comprising one double bond
  misc_feature (4)..(11): Crosslink between residues
  MOD_RES (8)..(8): Ornithine
  MOD_RES (11)..(11): Alpha-Me S5-pentenyl-alanine olefin amino acid connected by an all-carbon crosslinker comprising one double bond
  C-term NH2
LTFAAYWXQLAS

SEQ ID NO: 1077 - protein, 12 aa, Artificial Sequence
  Description of Artificial Sequence: Synthetic peptide
  N-term Ac
  MOD_RES (4)..(4): Alpha-Me R8-octenyl-alanine olefin amino acid connected by an all-carbon crosslinker comprising one double bond
  misc_feature (4)..(11): Crosslink between residues
  MOD_RES (11)..(11): Alpha-Me S5-pentenyl-alanine olefin amino acid connected by an all-carbon crosslinker comprising one double bond
  C-term NH2
LTFAAYWRQLAS

SEQ ID NO: 1078 - protein, 12 aa, Artificial Sequence
  Description of Artificial Sequence: Synthetic peptide
  N-term Ac
  MOD_RES (4)..(4): Alpha-Me R8-octenyl-alanine olefin amino acid connected by an all-carbon crosslinker comprising one double bond
  misc_feature (4)..(11): Crosslink between residues
  MOD_RES (11)..(11): Alpha-Me S5-pentenyl-alanine olefin amino acid connected by an all-carbon crosslinker comprising one double bond
  C-term NH2
LTFAAYWSQLAS

SEQ ID NO: 1079 - protein, 12 aa, Artificial Sequence
  Description of Artificial Sequence: Synthetic peptide
  N-term Ac
  MOD_RES (4)..(4): Alpha-Me R8-octenyl-alanine olefin amino acid connected by an all-carbon crosslinker comprising one double bond
  misc_feature (4)..(11): Crosslink between residues
  MOD_RES (11)..(11): Alpha-Me S5-pentenyl-alanine olefin amino acid connected by an all-carbon crosslinker comprising one double bond
  C-term NH2
LTFAAYWRALAS

SEQ ID NO: 1080 - protein, 12 aa, Artificial Sequence
  Description of Artificial Sequence: Synthetic peptide
  N-term Ac
  MOD_RES (4)..(4): Alpha-Me R8-octenyl-alanine olefin amino acid connected by an all-carbon crosslinker comprising one double bond
  misc_feature (4)..(11): Crosslink between residues
  MOD_RES (11)..(11): Alpha-Me S5-pentenyl-alanine olefin amino acid connected by an all-carbon crosslinker comprising one double bond
  C-term NH2
LTFAAYWRQLAA

SEQ ID NO: 1081 - protein, 12 aa, Artificial Sequence
  Description of Artificial Sequence: Synthetic peptide
  N-term Ac
  MOD_RES (4)..(4): Alpha-Me R8-octenyl-alanine olefin amino acid connected by an all-carbon crosslinker comprising one double bond
  misc_feature (4)..(11): Crosslink between residues
  MOD_RES (11)..(11): Alpha-Me S5-pentenyl-alanine olefin amino acid connected by an all-carbon crosslinker comprising one double bond
  C-term NH2
LTFAAYWRALAA

SEQ ID NO: 1082 - protein, 12 aa, Artificial Sequence
  Description of Artificial Sequence: Synthetic peptide
  N-term Ac
  MOD_RES (4)..(4): Alpha-Me R5-pentenyl-alanine olefin amino acid connected by an all-carbon crosslinker comprising one double bond
  misc_feature (4)..(11): Crosslink between residues
  MOD_RES (11)..(11): Alpha-Me S8-octenyl-alanine olefin amino acid connected by an all-carbon crosslinker comprising one double bond
  C-term NH2
LTFAHYWAQLAS

SEQ ID NO: 1083 - protein, 12 aa, Artificial Sequence
  Description of Artificial Sequence: Synthetic peptide
  N-term Ac
  MOD_RES (4)..(4): Alpha-Me S5-pentenyl-alanine olefin amino acid connected by an all-carbon crosslinker comprising one double bond
  misc_feature (4)..(11): Crosslink between residues
  MOD_RES (11)..(11): Alpha-Me R8-octenyl-alanine olefin amino acid connected by an all-carbon crosslinker comprising one double bond
  C-term NH2
LTFAHYWAQLAS

SEQ ID NO: 1084 - protein, 12 aa, Artificial Sequence
  Description of Artificial Sequence: Synthetic peptide
  N-term Ac
  MOD_RES (4)..(4): Alpha-Me R8-octenyl-alanine olefin amino acid connected by an all-carbon crosslinker comprising one double bond
  misc_feature (4)..(11): Crosslink between residues
  MOD_RES (11)..(11): Alpha-Me S5-pentenyl-alanine olefin amino acid connected by an all-carbon crosslinker comprising one double bond
  C-term NH2
LTFAHYWAALAS

SEQ ID NO: 1085 - protein, 12 aa, Artificial Sequence
  Description of Artificial Sequence: Synthetic peptide
  N-term Ac
  MOD_RES (4)..(4): Alpha-Me R8-octenyl-alanine olefin amino acid connected by an all-carbon crosslinker comprising one double bond
  misc_feature (4)..(11): Crosslink between residues
  MOD_RES (9)..(9): Abu
  MOD_RES (11)..(11): Alpha-Me S5-pentenyl-alanine olefin amino acid connected by an all-carbon crosslinker comprising one double bond
  C-term NH2
LTFAHYWAXLAS

SEQ ID NO: 1086 - protein, 12 aa, Artificial Sequence
  Description of Artificial Sequence: Synthetic peptide
  N-term Ac
  MOD_RES (4)..(4): Alpha-Me R8-octenyl-alanine olefin amino acid connected by an all-carbon crosslinker comprising one double bond
  misc_feature (4)..(11): Crosslink between residues
  MOD_RES (11)..(11): Alpha-Me S5-pentenyl-alanine olefin amino acid connected by an all-carbon crosslinker comprising one double bond
  C-term NH2
LTFAHYWALLAS

SEQ ID NO: 1087 - protein, 10 aa, Artificial Sequence
  Description of Artificial Sequence: Synthetic peptide
  N-term Ac
  MOD_RES (2)..(2): Alpha-Me R8-octenyl-alanine olefin amino acid connected by an all-carbon crosslinker comprising one double bond
  misc_feature (2)..(9): Crosslink between residues
  MOD_RES (9)..(9): Alpha-Me S5-pentenyl-alanine olefin amino acid connected by an all-carbon crosslinker comprising one double bond
  C-term NH2
FAAYWHALAA

SEQ ID NO: 1088 - protein, 10 aa, Artificial Sequence
  Description of Artificial Sequence: Synthetic peptide
  N-term Ac
  MOD_RES (2)..(2): Alpha-Me R8-octenyl-alanine olefin amino acid connected by an all-carbon crosslinker comprising one double bond
  misc_feature (2)..(9): Crosslink between residues
  MOD_RES (9)..(9): Alpha-Me S5-pentenyl-alanine olefin amino acid connected by an all-carbon crosslinker comprising one double bond
  C-term NH2
FAAYWAALAA

SEQ ID NO: 1089 - protein, 10 aa, Artificial Sequence
  Description of Artificial Sequence: Synthetic peptide
  N-term Ac
  MOD_RES (2)..(2): Alpha-Me R8-octenyl-alanine olefin amino acid connected by an all-carbon crosslinker comprising one double bond
  misc_feature (2)..(9): Crosslink between residues
  MOD_RES (9)..(9): Alpha-Me S5-pentenyl-alanine olefin amino acid connected by an all-carbon crosslinker comprising one double bond
  C-term NH2
FAAYWSALAA

SEQ ID NO: 1090 - protein, 10 aa, Artificial Sequence
  Description of Artificial Sequence: Synthetic peptide
  N-term Ac
  MOD_RES (2)..(2): Alpha-Me R8-octenyl-alanine olefin amino acid connected by an all-carbon crosslinker comprising one double bond
  misc_feature (2)..(9): Crosslink between residues
  MOD_RES (9)..(9): Alpha-Me S5-pentenyl-alanine olefin amino acid connected by an all-carbon crosslinker comprising one double bond
  C-term NH2
FAAYWRALAA

SEQ ID NO: 1091 - protein, 10 aa, Artificial Sequence
  Description of Artificial Sequence: Synthetic peptide
  N-term Ac
  MOD_RES (2)..(2): Alpha-Me R8-octenyl-alanine olefin amino acid connected by an all-carbon crosslinker comprising one double bond
  misc_feature (2)..(9): Crosslink between residues
  MOD_RES (9)..(9): Alpha-Me S5-pentenyl-alanine olefin amino acid connected by an all-carbon crosslinker comprising one double bond
  C-term NH2
FAAYWKALAA

SEQ ID NO: 1092 - protein, 10 aa, Artificial Sequence
  Description of Artificial Sequence: Synthetic peptide
  N-term Ac
  MOD_RES (2)..(2): Alpha-Me R8-octenyl-alanine olefin amino acid connected by an all-carbon crosslinker comprising one double bond
  misc_feature (2)..(9): Crosslink between residues
  MOD_RES (6)..(6): Ornithine
  MOD_RES (9)..(9): Alpha-Me S5-pentenyl-alanine olefin amino acid connected by an all-carbon crosslinker comprising one double bond
  C-term NH2
FAAYWXALAA

SEQ ID NO: 1093 - protein, 10 aa, Artificial Sequence
  Description of Artificial Sequence: Synthetic peptide
  N-term Ac
  MOD_RES (2)..(2): Alpha-Me R8-octenyl-alanine olefin amino acid connected by an all-carbon crosslinker comprising one double bond
  misc_feature (2)..(9): Crosslink between residues
  MOD_RES (7)..(7): Ac3c
  MOD_RES (9)..(9): Alpha-Me S5-pentenyl-alanine olefin amino acid connected by an all-carbon crosslinker comprising one double bond
  C-term NH2
FAVYWEXLAA

SEQ ID NO: 1094 - protein, 10 aa, Artificial Sequence
  Description of Artificial Sequence: Synthetic peptide
  N-term Ac
  MOD_RES (2)..(2): Alpha-Me R8-octenyl-alanine olefin amino acid connected by an all-carbon crosslinker comprising one double bond
  misc_feature (2)..(9): Crosslink between residues
  MOD_RES (7)..(7): Ac3c
  MOD_RES (9)..(9): Alpha-Me S5-pentenyl-alanine olefin amino acid connected by an all-carbon crosslinker comprising one double bond
  C-term NH2
FAFYWEXLAA

SEQ ID NO: 1095 - protein, 10 aa, Artificial Sequence
  Description of Artificial Sequence: Synthetic peptide
  N-term Ac
  MOD_RES (2)..(2): Alpha-Me R8-octenyl-alanine olefin amino acid connected by an all-carbon crosslinker comprising one double bond
  misc_feature (2)..(9): Crosslink between residues
  MOD_RES (7)..(7): Ac3c
  MOD_RES (9)..(9): Alpha-Me S5-pentenyl-alanine olefin amino acid connected by an all-carbon crosslinker comprising one double bond
  C-term NH2
FAWYWEXLAA

SEQ ID NO: 1096 - protein, 10 aa, Artificial Sequence
  Description of Artificial Sequence: Synthetic peptide
  N-term Ac
  MOD_RES (2)..(2): Alpha-Me R8-octenyl-alanine olefin amino acid connected by an all-carbon crosslinker comprising one double bond
  misc_feature (2)..(9): Crosslink between residues
  MOD_RES (7)..(7): Ac3c
  MOD_RES (9)..(9): Alpha-Me S5-pentenyl-alanine olefin amino acid connected by an all-carbon crosslinker comprising one double bond
  C-term NH2
FARYWEXLAA

SEQ ID NO: 1097 - protein, 10 aa, Artificial Sequence
  Description of Artificial Sequence: Synthetic peptide
  N-term Ac
  MOD_RES (2)..(2): Alpha-Me R8-octenyl-alanine olefin amino acid connected by an all-carbon crosslinker comprising one double bond
  misc_feature (2)..(9): Crosslink between residues
  MOD_RES (7)..(7): Ac3c
  MOD_RES (9)..(9): Alpha-Me S5-pentenyl-alanine olefin amino acid connected by an all-carbon crosslinker comprising one double bond
  C-term NH2
FAKYWEXLAA

SEQ ID NO: 1098 - protein, 10 aa, Artificial Sequence
  Description of Artificial Sequence: Synthetic peptide
  N-term Ac
  MOD_RES (2)..(2): Alpha-Me R8-octenyl-alanine olefin amino acid connected by an all-carbon crosslinker comprising one double bond
  misc_feature (2)..(9): Crosslink between residues
  MOD_RES (4)..(4): Norleucine
  MOD_RES (7)..(7): Ac3c
  MOD_RES (9)..(9): Alpha-Me S5-pentenyl-alanine olefin amino acid connected by an all-carbon crosslinker comprising one double bond
  C-term NH2
FAALWEXLAA

SEQ ID NO: 1099 - protein, 10 aa, Artificial Sequence
  Description of Artificial Sequence: Synthetic peptide
  N-term Ac
  MOD_RES (2)..(2): Alpha-Me R8-octenyl-alanine olefin amino acid connected by an all-carbon crosslinker comprising one double bond
  misc_feature (2)..(9): Crosslink between residues
  MOD_RES (7)..(7): Ac3c
  MOD_RES (9)..(9): Alpha-Me S5-pentenyl-alanine olefin amino acid connected by an all-carbon crosslinker comprising one double bond
  C-term NH2
FAAVWEXLAA

SEQ ID NO: 1100 - protein, 10 aa, Artificial Sequence
  Description of Artificial Sequence: Synthetic peptide
  N-term Ac
  MOD_RES (2)..(2): Alpha-Me R8-octenyl-alanine olefin amino acid connected by an all-carbon crosslinker comprising one double bond
  misc_feature (2)..(9): Crosslink between residues
  MOD_RES (7)..(7): Ac3c
  MOD_RES (9)..(9): Alpha-Me S5-pentenyl-alanine olefin amino acid connected by an all-carbon crosslinker comprising one double bond
  C-term NH2
FAAFWEXLAA

SEQ ID NO: 1101 - protein, 10 aa, Artificial Sequence
  Description of Artificial Sequence: Synthetic peptide
  N-term Ac
  MOD_RES (2)..(2): Alpha-Me R8-octenyl-alanine olefin amino acid connected by an all-carbon crosslinker comprising one double bond
  misc_feature (2)..(9): Crosslink between residues
  MOD_RES (7)..(7): Ac3c
  MOD_RES (9)..(9): Alpha-Me S5-pentenyl-alanine olefin amino acid connected by an all-carbon crosslinker comprising one double bond
  C-term NH2
FAAWWEXLAA

SEQ ID NO: 1102 - protein, 10 aa, Artificial Sequence
  Description of Artificial Sequence: Synthetic peptide
  N-term Ac
  MOD_RES (2)..(2): Alpha-Me R8-octenyl-alanine olefin amino acid connected by an all-carbon crosslinker comprising one double bond
  misc_feature (2)..(9): Crosslink between residues
  MOD_RES (7)..(7): Ac3c
  MOD_RES (9)..(9): Alpha-Me S5-pentenyl-alanine olefin amino acid connected by an all-carbon crosslinker comprising one double bond
  C-term NH2
FAARWEXLAA

SEQ ID NO: 1103 - protein, 10 aa, Artificial Sequence
  Description of Artificial Sequence: Synthetic peptide
  N-term Ac
  MOD_RES (2)..(2): Alpha-Me R8-octenyl-alanine olefin amino acid connected by an all-carbon crosslinker comprising one double bond
  misc_feature (2)..(9): Crosslink between residues
  MOD_RES (7)..(7): Ac3c
  MOD_RES (9)..(9): Alpha-Me S5-pentenyl-alanine olefin amino acid connected by an all-carbon crosslinker comprising one double bond
  C-term NH2
FAAKWEXLAA

SEQ ID NO: 1104 - protein, 10 aa, Artificial Sequence
  Description of Artificial Sequence: Synthetic peptide
  N-term Ac
  MOD_RES (2)..(2): Alpha-Me R8-octenyl-alanine olefin amino acid connected by an all-carbon crosslinker comprising one double bond
  misc_feature (2)..(9): Crosslink between residues
  MOD_RES (7)..(7): Ac3c
  MOD_RES (9)..(9): Alpha-Me S5-pentenyl-alanine olefin amino acid connected by an all-carbon crosslinker comprising one double bond
  C-term NH2
FAAYWVXLAA

SEQ ID NO: 1105 - protein, 10 aa, Artificial Sequence
  Description of Artificial Sequence: Synthetic peptide
  N-term Ac
  MOD_RES (2)..(2): Alpha-Me R8-octenyl-alanine olefin amino acid connected by an all-carbon crosslinker comprising one double bond
  misc_feature (2)..(9): Crosslink between residues
  MOD_RES (7)..(7): Ac3c
  MOD_RES (9)..(9): Alpha-Me S5-pentenyl-alanine olefin amino acid connected by an all-carbon crosslinker comprising one double bond
  C-term NH2
FAAYWFXLAA

SEQ ID NO: 1106 - protein, 10 aa, Artificial Sequence
  Description of Artificial Sequence: Synthetic peptide
  N-term Ac
  MOD_RES (2)..(2): Alpha-Me R8-octenyl-alanine olefin amino acid connected by an all-carbon crosslinker comprising one double bond
  misc_feature (2)..(9): Crosslink between residues
  MOD_RES (7)..(7): Ac3c
  MOD_RES (9)..(9): Alpha-Me S5-pentenyl-alanine olefin amino acid connected by an all-carbon crosslinker comprising one double bond
  C-term NH2
FAAYWWXLAA

SEQ ID NO: 1107 - protein, 10 aa, Artificial Sequence
  Description of Artificial Sequence: Synthetic peptide
  N-term Ac
  MOD_RES (2)..(2): Alpha-Me R8-octenyl-alanine olefin amino acid connected by an all-carbon crosslinker comprising one double bond
  misc_feature (2)..(9): Crosslink between residues
  MOD_RES (7)..(7): Ac3c
  MOD_RES (9)..(9): Alpha-Me S5-pentenyl-alanine olefin amino acid connected by an all-carbon crosslinker comprising one double bond
  C-term NH2
FAAYWRXLAA

SEQ ID NO: 1108 - protein, 10 aa, Artificial Sequence
  Description of Artificial Sequence: Synthetic peptide
  N-term Ac
  MOD_RES (2)..(2): Alpha-Me R8-octenyl-alanine olefin amino acid connected by an all-carbon crosslinker comprising one double bond
  misc_feature (2)..(9): Crosslink between residues
  MOD_RES (7)..(7): Ac3c
  MOD_RES (9)..(9): Alpha-Me S5-pentenyl-alanine olefin amino acid connected by an all-carbon crosslinker comprising one double bond
  C-term NH2
FAAYWKXLAA

SEQ ID NO: 1109 - protein, 10 aa, Artificial Sequence
  Description of Artificial Sequence: Synthetic peptide
  N-term Ac
  MOD_RES (2)..(2): Alpha-Me R8-octenyl-alanine olefin amino acid connected by an all-carbon crosslinker comprising one double bond
  misc_feature (2)..(9): Crosslink between residues
  MOD_RES (9)..(9): Alpha-Me S5-pentenyl-alanine olefin amino acid connected by an all-carbon crosslinker comprising one double bond
  C-term NH2
FAAYWEVLAA

SEQ ID NO: 1110 - protein, 10 aa, Artificial Sequence
  Description of Artificial Sequence: Synthetic peptide
  N-term Ac
  MOD_RES (2)..(2): Alpha-Me R8-octenyl-alanine olefin amino acid connected by an all-carbon crosslinker comprising one double bond
  misc_feature (2)..(9): Crosslink between residues
  MOD_RES (9)..(9): Alpha-Me S5-pentenyl-alanine olefin amino acid connected by an all-carbon crosslinker comprising one double bond
  C-term NH2
FAAYWEFLAA

SEQ ID NO: 1111 - protein, 10 aa, Artificial Sequence
  Description of Artificial Sequence: Synthetic peptide
  N-term Ac
  MOD_RES (2)..(2): Alpha-Me R8-octenyl-alanine olefin amino acid connected by an all-carbon crosslinker comprising one double bond
  misc_feature (2)..(9): Crosslink between residues
  MOD_RES (9)..(9): Alpha-Me S5-pentenyl-alanine olefin amino acid connected by an all-carbon crosslinker comprising one double bond
  C-term NH2
FAAYWEWLAA

SEQ ID NO: 1112 - protein, 10 aa, Artificial Sequence
  Description of Artificial Sequence: Synthetic peptide
  N-term Ac
  MOD_RES (2)..(2): Alpha-Me R8-octenyl-alanine olefin amino acid connected by an all-carbon crosslinker comprising one double bond
  misc_feature (2)..(9): Crosslink between residues
  MOD_RES (9)..(9): Alpha-Me S5-pentenyl-alanine olefin amino acid connected by an all-carbon crosslinker comprising one double bond
  C-term NH2
FAAYWERLAA

SEQ ID NO: 1113 - protein, 10 aa, Artificial Sequence
  Description of Artificial Sequence: Synthetic peptide
  N-term Ac
  MOD_RES (2)..(2): Alpha-Me R8-octenyl-alanine olefin amino acid connected by an all-carbon crosslinker comprising one double bond
  misc_feature (2)..(9): Crosslink between residues
  MOD_RES (9)..(9): Alpha-Me S5-pentenyl-alanine olefin amino acid connected by an all-carbon crosslinker comprising one double bond
  C-term NH2
FAAYWEKLAA

SEQ ID NO: 1114 - protein, 10 aa, Artificial Sequence
  Description of Artificial Sequence: Synthetic peptide
  N-term Ac
  MOD_RES (2)..(2): Alpha-Me R8-octenyl-alanine olefin amino acid connected by an all-carbon crosslinker comprising one double bond
  misc_feature (2)..(9): Crosslink between residues
  MOD_RES (7)..(7): Ac3c
  MOD_RES (9)..(9): Alpha-Me S5-pentenyl-alanine olefin amino acid connected by an all-carbon crosslinker comprising one double bond
  C-term NH2
FAAYWEXLAV

SEQ ID NO: 1115 - protein, 10 aa, Artificial Sequence
  Description of Artificial Sequence: Synthetic peptide
  N-term Ac
  MOD_RES (2)..(2): Alpha-Me R8-octenyl-alanine olefin amino acid connected by an all-carbon crosslinker comprising one double bond
  misc_feature (2)..(9): Crosslink between residues
  MOD_RES (7)..(7): Ac3c
  MOD_RES (9)..(9): Alpha-Me S5-pentenyl-alanine olefin amino acid connected by an all-carbon crosslinker comprising one double bond
  C-term NH2
FAAYWEXLAF

SEQ ID NO: 1116 - protein, 10 aa, Artificial Sequence
  Description of Artificial Sequence: Synthetic peptide
  N-term Ac
  MOD_RES (2)..(2): Alpha-Me R8-octenyl-alanine olefin amino acid connected by an all-carbon crosslinker comprising one double bond
  misc_feature (2)..(9): Crosslink between residues
  MOD_RES (7)..(7): Ac3c
  MOD_RES (9)..(9): Alpha-Me S5-pentenyl-alanine olefin amino acid connected by an all-carbon crosslinker comprising one double bond
  C-term NH2
FAAYWEXLAW

SEQ ID NO: 1117 - protein, 10 aa, Artificial Sequence
  Description of Artificial Sequence: Synthetic peptide
  N-term Ac
  MOD_RES (2)..(2): Alpha-Me R8-octenyl-alanine olefin amino acid connected by an all-carbon crosslinker comprising one double bond
  misc_feature (2)..(9): Crosslink between residues
  MOD_RES (7)..(7): Ac3c
  MOD_RES (9)..(9): Alpha-Me S5-pentenyl-alanine olefin amino acid connected by an all-carbon crosslinker comprising one double bond
  C-term NH2
FAAYWEXLAR

SEQ ID NO: 1118 - protein, 10 aa, Artificial Sequence
  Description of Artificial Sequence: Synthetic peptide
  N-term Ac
  MOD_RES (2)..(2): Alpha-Me R8-octenyl-alanine olefin amino acid connected by an all-carbon crosslinker comprising one double bond
  misc_feature (2)..(9): Crosslink between residues
  MOD_RES (7)..(7): Ac3c
  MOD_RES (9)..(9): Alpha-Me S5-pentenyl-alanine olefin amino acid connected by an all-carbon crosslinker comprising one double bond
  C-term NH2
FAAYWEXLAK

SEQ ID NO: 1119 - protein, 11 aa, Artificial Sequence
  Description of Artificial Sequence: Synthetic peptide
  N-term Ac
  MOD_RES (2)..(2): Alpha-Me R8-octenyl-alanine olefin amino acid connected by an all-carbon crosslinker comprising one double bond
  misc_feature (2)..(9): Crosslink between residues
  MOD_RES (7)..(7): Ac3c
  MOD_RES (9)..(9): Alpha-Me S5-pentenyl-alanine olefin amino acid connected by an all-carbon crosslinker comprising one double bond
  C-term NH2
FAAYWEXLAAV

SEQ ID NO: 1120 - protein, 11 aa, Artificial Sequence
  Description of Artificial Sequence: Synthetic peptide
  N-term Ac
  MOD_RES (2)..(2): Alpha-Me R8-octenyl-alanine olefin amino acid connected by an all-carbon crosslinker comprising one double bond
  misc_feature (2)..(9): Crosslink between residues
  MOD_RES (7)..(7): Ac3c
  MOD_RES (9)..(9): Alpha-Me S5-pentenyl-alanine olefin amino acid connected by an all-carbon crosslinker comprising one double bond
  C-term NH2
FAAYWEXLAAF

SEQ ID NO: 1121 - protein, 11 aa, Artificial Sequence
  Description of Artificial Sequence: Synthetic peptide
  N-term Ac
  MOD_RES (2)..(2): Alpha-Me R8-octenyl-alanine olefin amino acid connected by an all-carbon crosslinker comprising one double bond
  misc_feature (2)..(9): Crosslink between residues
  MOD_RES (7)..(7): Ac3c
  MOD_RES (9)..(9): Alpha-Me S5-pentenyl-alanine olefin amino acid connected by an all-carbon crosslinker comprising one double bond
  C-term NH2
FAAYWEXLAAW

SEQ ID NO: 1122 - protein, 11 aa, Artificial Sequence
  Description of Artificial Sequence: Synthetic peptide
  N-term Ac
  MOD_RES (2)..(2): Alpha-Me R8-octenyl-alanine olefin amino acid connected by an all-carbon crosslinker comprising one double bond
  misc_feature (2)..(9): Crosslink between residues
  MOD_RES (7)..(7): Ac3c
  MOD_RES (9)..(9): Alpha-Me S5-pentenyl-alanine olefin amino acid connected by an all-carbon crosslinker comprising one double bond
  C-term NH2
FAAYWEXLAAR

SEQ ID NO: 1123 - protein, 11 aa, Artificial Sequence
  Description of Artificial Sequence: Synthetic peptide
  N-term Ac
  MOD_RES (2)..(2): Alpha-Me R8-octenyl-alanine olefin amino acid connected by an all-carbon crosslinker comprising one double bond
  misc_feature (2)..(9): Crosslink between residues
  MOD_RES (7)..(7): Ac3c
  MOD_RES (9)..(9): Alpha-Me S5-pentenyl-alanine olefin amino acid connected by an all-carbon crosslinker comprising one double bond
  C-term NH2
FAAYWEXLAAK

SEQ ID NO: 1124 - protein, 11 aa, Artificial Sequence
  Description of Artificial Sequence: Synthetic peptide
  N-term Ac
  MOD_RES (2)..(2): Alpha-Me R8-octenyl-alanine olefin amino acid connected by an all-carbon crosslinker comprising one double bond
  misc_feature (2)..(9): Crosslink between residues
  MOD_RES (7)..(7): Ac3c
  MOD_RES (9)..(9): Alpha-Me S5-pentenyl-alanine olefin amino acid connected by an all-carbon crosslinker comprising one double bond
  C-term NH2
FAAYWEXLAAH

SEQ ID NO: 1125 - protein, 12 aa, Artificial Sequence
  Description of Artificial Sequence: Synthetic peptide
  N-term Ac
  MOD_RES (3)..(3): Phe-2NO2
  MOD_RES (4)..(4): Alpha-Me R8-octenyl-alanine olefin amino acid connected by an all-carbon crosslinker comprising one double bond
  misc_feature (4)..(11): Crosslink between residues
  MOD_RES (11)..(11): Alpha-Me S5-pentenyl-alanine olefin amino acid connected by an all-carbon crosslinker comprising one double bond
  C-term NH2
LTFAHYWAQLAS

SEQ ID NO: 1126 - protein, 12 aa, Artificial Sequence
  Description of Artificial Sequence: Synthetic peptide
  N-term Ac
  MOD_RES (4)..(4): Alpha-Me R8-octenyl-alanine olefin amino acid connected by an all-carbon crosslinker comprising one double bond
  misc_feature (4)..(11): Crosslink between residues
  MOD_RES (11)..(11): Alpha-Me S5-pentenyl-alanine olefin amino acid connected by an all-carbon crosslinker comprising one double bond
  C-term NH2
LTAAHYAAQLAS

SEQ ID NO: 1127 - protein, 12 aa, Artificial Sequence
  Description of Artificial Sequence: Synthetic peptide
  N-term Ac
  MOD_RES (4)..(4): Alpha-Me R8-octenyl-alanine olefin amino acid connected by an all-carbon crosslinker comprising one double bond
  misc_feature (4)..(11): Crosslink between residues
  MOD_RES (11)..(11): Alpha-Me S5-pentenyl-alanine olefin amino acid connected by an all-carbon crosslinker comprising one double bond
  C-term NH2
LTFAHYAAQLAS

SEQ ID NO: 1128 - protein, 16 aa, Artificial Sequence
  Description of Artificial Sequence: Synthetic peptide
  N-term Ac
  MOD_RES (7)..(7): Alpha-Me R8-octenyl-alanine olefin amino acid connected by an all-carbon crosslinker comprising one double bond
  misc_feature (7)..(14): Crosslink between residues
  MOD_RES (14)..(14): Alpha-Me S5-pentenyl-alanine olefin amino acid connected by an all-carbon crosslinker comprising one double bond
  C-term NH2
QSQQTFANLWALLAAN

SEQ ID NO: 1129 - protein, 16 aa, Artificial Sequence
  Description of Artificial Sequence: Synthetic peptide
  N-term Ac
  MOD_RES (2)..(2): 2-aminoisobutyric acid
  MOD_RES (7)..(7): Alpha-Me R8-octenyl-alanine olefin amino acid connected by an all-carbon crosslinker comprising one double bond
  misc_feature (7)..(14): Crosslink between residues
  MOD_RES (14)..(14): Alpha-Me S5-pentenyl-alanine olefin amino acid connected by an all-carbon crosslinker comprising one double bond
  C-term NH2
QXQQTFANLWALLAAN

SEQ ID NO: 1130 - protein, 16 aa, Artificial Sequence
  Description of Artificial Sequence: Synthetic peptide
  N-term Ac
  MOD_RES (2)..(2): 2-aminoisobutyric acid
  MOD_RES (7)..(7): Alpha-Me R8-octenyl-alanine olefin amino acid connected by an all-carbon crosslinker comprising one double bond
  misc_feature (7)..(14): Crosslink between residues
  MOD_RES (14)..(14): Alpha-Me S5-pentenyl-alanine olefin amino acid connected by an all-carbon crosslinker comprising one double bond
  C-term NH2
QXQQTFAALWALLAAN

SEQ ID NO: 1131 - protein, 16 aa, Artificial Sequence
  Description of Artificial Sequence: Synthetic peptide
  N-term Ac
  MOD_RES (7)..(7): Alpha-Me R8-octenyl-alanine olefin amino acid connected by an all-carbon crosslinker comprising one double bond
  misc_feature (7)..(14): Crosslink between residues
  MOD_RES (14)..(14): Alpha-Me S5-pentenyl-alanine olefin amino acid connected by an all-carbon crosslinker comprising one double bond
  C-term NH2
AAAATFAAAWAALAAA

SEQ ID NO: 1132 - protein, 10 aa, Artificial Sequence
  Description of Artificial Sequence: Synthetic peptide
  N-term Ac
  MOD_RES (2)..(2): Alpha-Me R8-octenyl-alanine olefin amino acid connected by an all-carbon crosslinker comprising one double bond
  misc_feature (2)..(9): Crosslink between residues
  MOD_RES (9)..(9): Alpha-Me S5-pentenyl-alanine olefin amino acid connected by an all-carbon crosslinker comprising one double bond
  C-term NH2
FAAAWRALAQ

SEQ ID NO: 1133 - protein, 11 aa, Artificial Sequence
  Description of Artificial Sequence: Synthetic peptide
  N-term Ac
  MOD_RES (3)..(3): Alpha-Me R8-octenyl-alanine olefin amino acid connected by an all-carbon crosslinker comprising one double bond
  misc_feature (3)..(10): Crosslink between residues
  MOD_RES (10)..(10): Alpha-Me S5-pentenyl-alanine olefin amino acid connected by an all-carbon crosslinker comprising one double bond
  C-term NH2
TFAAAWAALAQ

SEQ ID NO: 1134 - protein, 11 aa, Artificial Sequence
  Description of Artificial Sequence: Synthetic peptide
  N-term Ac
  MOD_RES (3)..(3): Alpha-Me R8-octenyl-alanine olefin amino acid connected by an all-carbon crosslinker comprising one double bond
  misc_feature (3)..(10): Crosslink between residues
  MOD_RES (10)..(10): Alpha-Me S5-pentenyl-alanine olefin amino acid connected by an all-carbon crosslinker comprising one double bond
  C-term NH2
TFAAAWRALAA

SEQ ID NO: 1135 - protein, 11 aa, Artificial Sequence
  Description of Artificial Sequence: Synthetic peptide
  N-term Ac
  MOD_RES (3)..(3): Alpha-Me R8-octenyl-alanine olefin amino acid connected by an all-carbon crosslinker comprising one double bond
  misc_feature (3)..(10): Crosslink between residues
  MOD_RES (10)..(10): Alpha-Me S5-pentenyl-alanine olefin amino acid connected by an all-carbon crosslinker comprising one double bond
  C-term NH2
VFAAAWRALAQ

SEQ ID NO: 1136 - protein, 11 aa, Artificial Sequence
  Description of Artificial Sequence: Synthetic peptide
  N-term Ac
  MOD_RES (3)..(3): Alpha-Me R8-octenyl-alanine olefin amino acid connected by an all-carbon crosslinker comprising one double bond
  misc_feature (3)..(10): Crosslink between residues
  MOD_RES (10)..(10): Alpha-Me S5-pentenyl-alanine olefin amino acid connected by an all-carbon crosslinker comprising one double bond
  C-term NH2
AFAAAWAALAA

SEQ ID NO: 1137 - protein, 11 aa, Artificial Sequence
  Description of Artificial Sequence: Synthetic peptide
  N-term Ac
  MOD_RES (3)..(3): Alpha-Me R8-octenyl-alanine olefin amino acid connected by an all-carbon crosslinker comprising one double bond
  misc_feature (3)..(10): Crosslink between residues
  MOD_RES (10)..(10): Alpha-Me S5-pentenyl-alanine olefin amino acid connected by an all-carbon crosslinker comprising one double bond
  C-term NH2
TFAAAWKALAQ

SEQ ID NO: 1138 - protein, 11 aa, Artificial Sequence
  Description of Artificial Sequence: Synthetic peptide
  N-term Ac
  MOD_RES (3)..(3): Alpha-Me R8-octenyl-alanine olefin amino acid connected by an all-carbon crosslinker comprising one double bond
  misc_feature (3)..(10): Crosslink between residues
  MOD_RES (7)..(7): Ornithine
  MOD_RES (10)..(10): Alpha-Me S5-pentenyl-alanine olefin amino acid connected by an all-carbon crosslinker comprising one double bond
  C-term NH2
TFAAAWXALAQ

SEQ ID NO: 1139 - protein, 11 aa, Artificial Sequence
  Description of Artificial Sequence: Synthetic peptide
  N-term Ac
  MOD_RES (3)..(3): Alpha-Me R8-octenyl-alanine olefin amino acid connected by an all-carbon crosslinker comprising one double bond
  misc_feature (3)..(10): Crosslink between residues
  MOD_RES (10)..(10): Alpha-Me S5-pentenyl-alanine olefin amino acid connected by an all-carbon crosslinker comprising one double bond
  C-term NH2
TFAAAWSALAQ

SEQ ID NO: 1140 - protein, 12 aa, Artificial Sequence
  Description of Artificial Sequence: Synthetic peptide
  N-term Ac
  MOD_RES (4)..(4): Alpha-Me R8-octenyl-alanine olefin amino acid connected by an all-carbon crosslinker comprising one double bond
  misc_feature (4)..(11): Crosslink between residues
  MOD_RES (11)..(11): Alpha-Me S5-pentenyl-alanine olefin amino acid connected by an all-carbon crosslinker comprising one double bond
  C-term NH2
LTFAAAWRALAQ

SEQ ID NO: 1141 - protein, 10 aa, Artificial Sequence
  Description of Artificial Sequence: Synthetic peptide
  N-term Ac
  MOD_RES (2)..(2): Alpha-Me R8-octenyl-alanine olefin amino acid connected by an all-carbon crosslinker comprising one double bond
  misc_feature (2)..(9): Crosslink between residues
  MOD_RES (9)..(9): Alpha-Me S5-pentenyl-alanine olefin amino acid connected by an all-carbon crosslinker comprising one double bond
  C-term NH2
FAAYWAQLAA

SEQ ID NO: 1142 - protein, 10 aa, Artificial Sequence
  Description of Artificial Sequence: Synthetic peptide
  N-term Ac
  MOD_RES (2)..(2): Alpha-Me R8-octenyl-alanine olefin amino acid connected by an all-carbon crosslinker comprising one double bond
  misc_feature (2)..(9): Crosslink between residues
  MOD_RES (9)..(9): Alpha-Me S5-pentenyl-alanine olefin amino acid connected by an all-carbon crosslinker comprising one double bond
  C-term NH2
FAAWWAALAA

SEQ ID NO: 1143 - protein, 10 aa, Artificial Sequence
  Description of Artificial Sequence: Synthetic peptide
  N-term Ac
  MOD_RES (2)..(2): Alpha-Me R8-octenyl-alanine olefin amino acid connected by an all-carbon crosslinker comprising one double bond
  misc_feature (2)..(9): Crosslink between residues
  MOD_RES (9)..(9): Alpha-Me S5-pentenyl-alanine olefin amino acid connected by an all-carbon crosslinker comprising one double bond
  C-term NH2
FAAWWAQLAA

SEQ ID NO: 1144 - protein, 9 aa, Artificial Sequence
  Description of Artificial Sequence: Synthetic peptide
  N-term Ac
  MOD_RES (2)..(2): Alpha-Me R8-octenyl-alanine olefin amino acid connected by an all-carbon crosslinker comprising one double bond
  misc_feature (2)..(9): Crosslink between residues
  MOD_RES (9)..(9): Alpha-Me S5-pentenyl-alanine olefin amino acid connected by an all-carbon crosslinker comprising one double bond
  C-term NH2
FAAYWEALA

SEQ ID NO: 1145 - protein, 9 aa, Artificial Sequence
  Description of Artificial Sequence: Synthetic peptide
  N-term Ac
  MOD_RES (2)..(2): Alpha-Me R8-octenyl-alanine olefin amino acid connected by an all-carbon crosslinker comprising one double bond
  misc_feature (2)..(9): Crosslink between residues
  MOD_RES (9)..(9): Alpha-Me S5-pentenyl-alanine olefin amino acid connected by an all-carbon crosslinker comprising one double bond
  C-term NH2
FAAYWAALA

SEQ ID NO: 1146 - protein, 9 aa, Artificial Sequence
  Description of Artificial Sequence: Synthetic peptide
  N-term Ac
  MOD_RES (2)..(2): Alpha-Me R8-octenyl-alanine olefin amino acid connected by an all-carbon crosslinker comprising one double bond
  misc_feature (2)..(9): Crosslink between residues
  MOD_RES (9)..(9): Alpha-Me S5-pentenyl-alanine olefin amino acid connected by an all-carbon crosslinker comprising one double bond
  C-term NH2
FAAYWKALA

SEQ ID NO: 1147 - protein, 9 aa, Artificial Sequence
  Description of Artificial Sequence: Synthetic peptide
  N-term Ac
  MOD_RES (2)..(2): Alpha-Me R8-octenyl-alanine olefin amino acid connected by an all-carbon crosslinker comprising one double bond
  misc_feature (2)..(9): Crosslink between residues
  MOD_RES (6)..(6): Ornithine
  MOD_RES (9)..(9): Alpha-Me S5-pentenyl-alanine olefin amino acid connected by an all-carbon crosslinker comprising one double bond
  C-term NH2
FAAYWXALA

SEQ ID NO: 1148 - protein, 9 aa, Artificial Sequence
  Description of Artificial Sequence: Synthetic peptide
  N-term Ac
  MOD_RES (2)..(2): Alpha-Me R8-octenyl-alanine olefin amino acid connected by an all-carbon crosslinker comprising one double bond
  misc_feature (2)..(9): Crosslink between residues
  MOD_RES (9)..(9): Alpha-Me S5-pentenyl-alanine olefin amino acid connected by an all-carbon crosslinker comprising one double bond
  C-term NH2
FAAYWQALA

SEQ ID NO: 1149 - protein, 9 aa, Artificial Sequence
  Description of Artificial Sequence: Synthetic peptide
  N-term Ac
  MOD_RES (2)..(2): Alpha-Me R8-octenyl-alanine olefin amino acid connected by an all-carbon crosslinker comprising one double bond
  misc_feature (2)..(9): Crosslink between residues
  MOD_RES (9)..(9): Alpha-Me S5-pentenyl-alanine olefin amino acid connected by an all-carbon crosslinker comprising one double bond
  C-term NH2
FAAYWAQLA

SEQ ID NO: 1150 - protein, 10 aa, Artificial Sequence
  Description of Artificial Sequence: Synthetic peptide
  N-term Ac
  MOD_RES (2)..(2): Alpha-Me R8-octenyl-alanine olefin amino acid connected by an all-carbon crosslinker comprising one double bond
  misc_feature (2)..(9): Crosslink between residues
  MOD_RES (9)..(9): Alpha-Me S5-pentenyl-alanine olefin amino acid connected by an all-carbon crosslinker comprising one double bond
  C-term NH2
FAHYWDQLAS

SEQ ID NO: 1151 - protein, 10 aa, Artificial Sequence
  Description of Artificial Sequence: Synthetic peptide
  N-term Ac
  MOD_RES (2)..(2): Alpha-Me R8-octenyl-alanine olefin amino acid connected by an all-carbon crosslinker comprising one double bond
  misc_feature (2)..(9): Crosslink between residues
  MOD_RES (9)..(9): Alpha-Me S5-pentenyl-alanine olefin amino acid connected by an all-carbon crosslinker comprising one double bond
  C-term NH2
FAHFWEQLAS

SEQ ID NO: 1152 - protein, 10 aa, Artificial Sequence
  Description of Artificial Sequence: Synthetic peptide
  N-term Ac
  MOD_RES (2)..(2): Alpha-Me R8-octenyl-alanine olefin amino acid connected by an all-carbon crosslinker comprising one double bond
  misc_feature (2)..(9): Crosslink between residues
  MOD_RES (9)..(9): Alpha-Me S5-pentenyl-alanine olefin amino acid connected by an all-carbon crosslinker comprising one double bond
  C-term NH2
FAAYWHQLAS

SEQ ID NO: 1153 - protein, 10 aa, Artificial Sequence
  Description of Artificial Sequence: Synthetic peptide
  N-term Ac
  MOD_RES (2)..(2): Alpha-Me R8-octenyl-alanine olefin amino acid connected by an all-carbon crosslinker comprising one double bond
  misc_feature (2)..(9): Crosslink between residues
  MOD_RES (9)..(9): Alpha-Me S5-pentenyl-alanine olefin amino acid connected by an all-carbon crosslinker comprising one double bond
  C-term NH2
FAAYWKQLAS

SEQ ID NO: 1154 - protein, 10 aa, Artificial Sequence
  Description of Artificial Sequence: Synthetic peptide
  N-term Ac
  MOD_RES (2)..(2): Alpha-Me R8-octenyl-alanine olefin amino acid connected by an all-carbon crosslinker comprising one double bond
  misc_feature (2)..(9): Crosslink between residues
  MOD_RES (6)..(6): Ornithine
  MOD_RES (9)..(9): Alpha-Me S5-pentenyl-alanine olefin amino acid connected by an all-carbon crosslinker comprising one double bond
  C-term NH2
FAAYWXQLAS

SEQ ID NO: 1155 - protein, 10 aa, Artificial Sequence
  Description of Artificial Sequence: Synthetic peptide
  N-term Ac
  MOD_RES (2)..(2): Alpha-Me R8-octenyl-alanine olefin amino acid connected by an all-carbon crosslinker comprising one double bond
  misc_feature (2)..(9): Crosslink between residues
  MOD_RES (9)..(9): Alpha-Me S5-pentenyl-alanine olefin amino acid connected by an all-carbon crosslinker comprising one double bond
  C-term NH2
FAHYWSQLAS

SEQ ID NO: 1156 - protein, 10 aa, Artificial Sequence
  Description of Artificial Sequence: Synthetic peptide
  N-term Ac
  MOD_RES (2)..(2): Alpha-Me R8-octenyl-alanine olefin amino acid connected by an all-carbon crosslinker comprising one double bond
  misc_feature (2)..(9): Crosslink between residues
  MOD_RES (9)..(9): Alpha-Me S5-pentenyl-alanine olefin amino acid connected by an all-carbon crosslinker comprising one double bond
  C-term NH2
FAHWWEQLAS

SEQ ID NO: 1157 - protein, 10 aa, Artificial Sequence
  Description of Artificial Sequence: Synthetic peptide
  N-term Ac
  MOD_RES (2)..(2): Alpha-Me R8-octenyl-alanine olefin amino acid connected by an all-carbon crosslinker comprising one double bond
  misc_feature (2)..(9): Crosslink between residues
  MOD_RES (9)..(9): Alpha-Me S5-pentenyl-alanine olefin amino acid connected by an all-carbon crosslinker comprising one double bond
  C-term NH2
FAHWWAQLAS

SEQ ID NO: 1158 - protein, 10 aa, Artificial Sequence
  Description of Artificial Sequence: Synthetic peptide
  N-term Ac
  MOD_RES (2)..(2): Alpha-Me R8-octenyl-alanine olefin amino acid connected by an all-carbon crosslinker comprising one double bond
  misc_feature (2)..(9): Crosslink between residues
  MOD_RES (9)..(9): Alpha-Me S5-pentenyl-alanine olefin amino acid connected by an all-carbon crosslinker comprising one double bond
  C-term NH2
FAAWWHQLAS

SEQ ID NO: 1159 - protein, 10 aa, Artificial Sequence
  Description of Artificial Sequence: Synthetic peptide
  N-term Ac
  MOD_RES (2)..(2): Alpha-Me R8-octenyl-alanine olefin amino acid connected by an all-carbon crosslinker comprising one double bond
  misc_feature (2)..(9): Crosslink between residues
  MOD_RES (9)..(9): Alpha-Me S5-pentenyl-alanine olefin amino acid connected by an all-carbon crosslinker comprising one double bond
  C-term NH2
FAAWWKQLAS

SEQ ID NO: 1160 - protein, 10 aa, Artificial Sequence
  Description of Artificial Sequence: Synthetic peptide
  N-term Ac
  MOD_RES (2)..(2): Alpha-Me R8-octenyl-alanine olefin amino acid connected by an all-carbon crosslinker comprising one double bond
  misc_feature (2)..(9): Crosslink between residues
  MOD_RES (6)..(6): Ornithine
  MOD_RES (9)..(9): Alpha-Me S5-pentenyl-alanine olefin amino acid connected by an all-carbon crosslinker comprising one double bond
  C-term NH2
FAAWWXQLAS

SEQ ID NO: 1161 - protein, 10 aa, Artificial Sequence
  Description of Artificial Sequence: Synthetic peptide
  N-term Ac
  MOD_RES (2)..(2): Alpha-Me R8-octenyl-alanine olefin amino acid connected by an all-carbon crosslinker comprising one double bond
  misc_feature (2)..(9): Crosslink between residues
  MOD_RES (9)..(9): Alpha-Me S5-pentenyl-alanine olefin amino acid connected by an all-carbon crosslinker comprising one double bond
  C-term NH2
FAHWWSQLAS

SEQ ID NO: 1162 - protein, 12 aa, Artificial Sequence
  Description of Artificial Sequence: Synthetic peptide
  N-term Ac
  MOD_RES (4)..(4): Alpha-Me R8-octenyl-alanine olefin amino acid connected by an all-carbon crosslinker comprising one double bond
  misc_feature (4)..(11): Crosslink between residues
  MOD_RES (9)..(9): Norleucine
  MOD_RES (11)..(11): Alpha-Me S5-pentenyl-alanine olefin amino acid connected by an all-carbon crosslinker comprising one double bond
  C-term NH2
LTFANYWALLAQ

SEQ ID NO: 1163 - protein, 12 aa, Artificial Sequence
  Description of Artificial Sequence: Synthetic peptide
  N-term Ac
  MOD_RES (4)..(4): Alpha-Me R8-octenyl-alanine olefin amino acid connected by an all-carbon crosslinker comprising one double bond
  misc_feature (4)..(11): Crosslink between residues
  MOD_RES (11)..(11): Alpha-Me S5-pentenyl-alanine olefin amino acid connected by an all-carbon crosslinker comprising one double bond
  C-term NH2
LTFANLWAQLAQ

SEQ ID NO: 1164 - protein, 12 aa, Artificial Sequence
  Description of Artificial Sequence: Synthetic peptide
  N-term Ac
  MOD_RES (4)..(4): Alpha-Me R8-octenyl-alanine olefin amino acid connected by an all-carbon crosslinker comprising one double bond
  misc_feature (4)..(11): Crosslink between residues
  MOD_RES (9)..(9): Norleucine
  MOD_RES (11)..(11): Alpha-Me S5-pentenyl-alanine olefin amino acid connected by an all-carbon crosslinker comprising one double bond
  C-term NH2
LTFANYWALLAA

SEQ ID NO: 1165 - protein, 12 aa, Artificial Sequence
  Description of Artificial Sequence: Synthetic peptide
  N-term Ac
  MOD_RES (4)..(4): Alpha-Me R8-octenyl-alanine olefin amino acid connected by an all-carbon crosslinker comprising one double bond
  misc_feature (4)..(11): Crosslink between residues
  MOD_RES (11)..(11): Alpha-Me S5-pentenyl-alanine olefin amino acid connected by an all-carbon crosslinker comprising one double bond
  C-term NH2
LTFANLWAQLAA

SEQ ID NO: 1166 - protein, 12 aa, Artificial Sequence
  Description of Artificial Sequence: Synthetic peptide
  N-term Ac
  MOD_RES (4)..(4): Alpha-Me R8-octenyl-alanine olefin amino acid connected by an all-carbon crosslinker comprising one double bond
  misc_feature (4)..(11): Crosslink between residues
  MOD_RES (9)..(9): Norleucine
  MOD_RES (11)..(11): Alpha-Me S5-pentenyl-alanine olefin amino acid connected by an all-carbon crosslinker comprising one double bond
  C-term NH2
LTFAAYWALLAQ

SEQ ID NO: 1167 - protein, 12 aa, Artificial Sequence
  Description of Artificial Sequence: Synthetic peptide
  N-term Ac
  MOD_RES (4)..(4): Alpha-Me R8-octenyl-alanine olefin amino acid connected by an all-carbon crosslinker comprising one double bond
  misc_feature (4)..(11): Crosslink between residues
  MOD_RES (11)..(11): Alpha-Me S5-pentenyl-alanine olefin amino acid connected by an all-carbon crosslinker comprising one double bond
  C-term NH2
LTFAALWAQLAQ

SEQ ID NO: 1168 - protein, 12 aa, Artificial Sequence
  Description of Artificial Sequence: Synthetic peptide
  N-term Ac
  MOD_RES (4)..(4): Alpha-Me R8-octenyl-alanine olefin amino acid connected by an all-carbon crosslinker comprising one double bond
  misc_feature (4)..(11): Crosslink between residues
  MOD_RES (9)..(9): Norleucine
  MOD_RES (11)..(11): Alpha-Me S5-pentenyl-alanine olefin amino acid connected by an all-carbon crosslinker comprising one double bond
  C-term NH2
LAFANYWALLAQ

SEQ ID NO: 1169 - protein, 12 aa, Artificial Sequence
  Description of Artificial Sequence: Synthetic peptide
  N-term Ac
  MOD_RES (4)..(4): Alpha-Me R8-octenyl-alanine olefin amino acid connected by an all-carbon crosslinker comprising one double bond
  misc_feature (4)..(11): Crosslink between residues
  MOD_RES (11)..(11): Alpha-Me S5-pentenyl-alanine olefin amino acid connected by an all-carbon crosslinker comprising one double bond
  C-term NH2
LAFANLWAQLAQ

SEQ ID NO: 1170 - protein, 12 aa, Artificial Sequence
  Description of Artificial Sequence: Synthetic peptide
  N-term Ac
  MOD_RES (4)..(4): Alpha-Me R8-octenyl-alanine olefin amino acid connected by an all-carbon crosslinker comprising one double bond
  misc_feature (4)..(11): Crosslink between residues
  MOD_RES (9)..(9): Norleucine
  MOD_RES (11)..(11): Alpha-Me S5-pentenyl-alanine olefin amino acid connected by an all-carbon crosslinker comprising one double bond
  C-term NH2
LAFAAYWALLAA

SEQ ID NO: 1171 - protein, 12 aa, Artificial Sequence
  Description of Artificial Sequence: Synthetic peptide
  N-term Ac
  MOD_RES (4)..(4): Alpha-Me R8-octenyl-alanine olefin amino acid connected by an all-carbon crosslinker comprising one double bond
  misc_feature (4)..(11): Crosslink between residues
  MOD_RES (11)..(11): Alpha-Me S5-pentenyl-alanine olefin amino acid connected by an all-carbon crosslinker comprising one double bond
  C-term NH2
LAFAALWAQLAA

SEQ ID NO: 1172 - protein, 12 aa, Artificial Sequence
  Description of Artificial Sequence: Synthetic peptide
  N-term Ac
  MOD_RES (4)..(4): Alpha-Me R8-octenyl-alanine olefin amino acid connected by an all-carbon crosslinker comprising one double bond
  misc_feature (4)..(11): Crosslink between residues
  MOD_RES (11)..(11): Alpha-Me S5-pentenyl-alanine olefin amino acid connected by an all-carbon crosslinker comprising one double bond
  C-term NH2
LAFAAYWAALAA

SEQ ID NO: 1173 - protein, 11 aa, Artificial Sequence
  Description of Artificial Sequence: Synthetic peptide
  N-term Ac
  MOD_RES (2)..(2): Alpha-Me R8-octenyl-alanine olefin amino acid connected by an all-carbon crosslinker comprising one double bond
  misc_feature (2)..(9): Crosslink between residues
  MOD_RES (7)..(7): Ac3c
  MOD_RES (9)..(9): Alpha-Me S5-pentenyl-alanine olefin amino acid connected by an all-carbon crosslinker comprising one double bond
  MOD_RES (11)..(11): 2-aminoisobutyric acid
  C-term NH2
FAAYWEXLAAX

SEQ ID NO: 1174 - protein, 11 aa, Artificial Sequence
  Description of Artificial Sequence: Synthetic peptide
  N-term Ac
  MOD_RES (2)..(2): Alpha-Me R8-octenyl-alanine olefin amino acid connected by an all-carbon crosslinker comprising one double bond
  misc_feature (2)..(9): Crosslink between residues
  MOD_RES (9)..(9): Alpha-Me S5-pentenyl-alanine olefin amino acid connected by an all-carbon crosslinker comprising one double bond
  C-term NH2
FAAYWAQLAAA

SEQ ID NO: 1175 - protein, 11 aa, Artificial Sequence
  Description of Artificial Sequence: Synthetic peptide
  N-term Ac
  MOD_RES (2)..(2): Alpha-Me R8-octenyl-alanine olefin amino acid connected by an all-carbon crosslinker comprising one double bond
  misc_feature (2)..(9): Crosslink between residues
  MOD_RES (7)..(7): Ac3c
  MOD_RES (9)..(9): Alpha-Me S5-pentenyl-alanine olefin amino acid connected by an all-carbon crosslinker comprising one double bond
  C-term NH2
FAAYWAXLAAA

SEQ ID NO: 1176 - protein, 11 aa, Artificial Sequence
  Description of Artificial Sequence: Synthetic peptide
  N-term Ac
  MOD_RES (2)..(2): Alpha-Me R8-octenyl-alanine olefin amino acid connected by an all-carbon crosslinker comprising one double bond
  misc_feature (2)..(9): Crosslink between residues
  MOD_RES (7)..(7): Ac3c
  MOD_RES (9)..(9): Alpha-Me S5-pentenyl-alanine olefin amino acid connected by an all-carbon crosslinker comprising one double bond
  C-term NH2
FAAYWSXLAAA

SEQ ID NO: 1177 - protein, 11 aa, Artificial Sequence
  Description of Artificial Sequence: Synthetic peptide
  N-term Ac
  MOD_RES (2)..(2): Alpha-Me R8-octenyl-alanine olefin amino acid connected by an all-carbon crosslinker comprising one double bond
  misc_feature (2)..(9): Crosslink between residues
  MOD_RES (7)..(7): Ac3c
  MOD_RES (9)..(9): Alpha-Me S5-pentenyl-alanine olefin amino acid connected by an all-carbon crosslinker comprising one double bond
  C-term NH2
FAAYWEXLAAS

SEQ ID NO: 1178 - protein, 11 aa, Artificial Sequence
  Description of Artificial Sequence: Synthetic peptide
  N-term Ac
  MOD_RES (2)..(2): Alpha-Me R8-octenyl-alanine olefin amino acid connected by an all-carbon crosslinker comprising one double bond
  misc_feature (2)..(9): Crosslink between residues
  MOD_RES (7)..(7): Ac3c
  MOD_RES (9)..(9): Alpha-Me S5-pentenyl-alanine olefin amino acid connected by an all-carbon crosslinker comprising one double bond
  C-term NH2
FAAYWEXLAAT

SEQ ID NO: 1179 - protein, 11 aa, Artificial Sequence
  Description of Artificial Sequence: Synthetic peptide
  N-term Ac
  MOD_RES (2)..(2): Alpha-Me R8-octenyl-alanine olefin amino acid connected by an all-carbon crosslinker comprising one double bond
  misc_feature (2)..(9): Crosslink between residues
  MOD_RES (7)..(7): Ac3c
  MOD_RES (9)..(9): Alpha-Me S5-pentenyl-alanine olefin amino acid connected by an all-carbon crosslinker comprising one double bond
  C-term NH2
FAAYWEXLAAL

SEQ ID NO: 1180 - protein, 11 aa, Artificial Sequence
  Description of Artificial Sequence: Synthetic peptide
  N-term Ac
  MOD_RES (2)..(2): Alpha-Me R8-octenyl-alanine olefin amino acid connected by an all-carbon crosslinker comprising one double bond
  misc_feature (2)..(9): Crosslink between residues
  MOD_RES (7)..(7): Ac3c
  MOD_RES (9)..(9): Alpha-Me S5-pentenyl-alanine olefin amino acid connected by an all-carbon crosslinker comprising one double bond
  C-term NH2
FAAYWEXLAAQ

SEQ ID NO: 1181 - protein, 11 aa, Artificial Sequence
  Description of Artificial Sequence: Synthetic peptide
  N-term Ac
  MOD_RES (2)..(2): Alpha-Me R8-octenyl-alanine olefin amino acid connected by an all-carbon crosslinker comprising one double bond
  misc_feature (2)..(9): Crosslink between residues
  MOD_RES (7)..(7): Ac3c
  MOD_RES (9)..(9): Alpha-Me S5-pentenyl-alanine olefin amino acid connected by an all-carbon crosslinker comprising one double bond
  C-term NH2
FAAFWEXLAAA

SEQ ID NO: 1182 - protein, 11 aa, Artificial Sequence
  Description of Artificial Sequence: Synthetic peptide
  N-term Ac
  MOD_RES (2)..(2): Alpha-Me R8-octenyl-alanine olefin amino acid connected by an all-carbon crosslinker comprising one double bond
  misc_feature (2)..(9): Crosslink between residues
  MOD_RES (7)..(7): Ac3c
  MOD_RES (9)..(9): Alpha-Me S5-pentenyl-alanine olefin amino acid connected by an all-carbon crosslinker comprising one double bond
  C-term NH2
FAAWWEXLAAA

SEQ ID NO: 1183 - protein, 11 aa, Artificial Sequence
  Description of Artificial Sequence: Synthetic peptide
  N-term Ac
  MOD_RES (2)..(2): Alpha-Me R8-octenyl-alanine olefin amino acid connected by an all-carbon crosslinker comprising one double bond
  misc_feature (2)..(9): Crosslink between residues
  MOD_RES (7)..(7): Ac3c
  MOD_RES (9)..(9): Alpha-Me S5-pentenyl-alanine olefin amino acid connected by an all-carbon crosslinker comprising one double bond
  C-term NH2
FAAYWEXLASA

SEQ ID NO: 1184 - protein, 11 aa, Artificial Sequence
  Description of Artificial Sequence: Synthetic peptide
  N-term Ac
  MOD_RES (2)..(2): Alpha-Me R8-octenyl-alanine olefin amino acid connected by an all-carbon crosslinker comprising one double bond
  misc_feature (2)..(9): Crosslink between residues
  MOD_RES (9)..(9): Alpha-Me S5-pentenyl-alanine olefin amino acid connected by an all-carbon crosslinker comprising one double bond
  C-term NH2
FAAYWEALAAA

SEQ ID NO: 1185 - protein, 11 aa, Artificial Sequence
  Description of Artificial Sequence: Synthetic peptide
  N-term Ac
  MOD_RES (2)..(2): Alpha-Me R8-octenyl-alanine olefin amino acid connected by an all-carbon crosslinker comprising one double bond
  misc_feature (2)..(9): Crosslink between residues
  MOD_RES (7)..(7): Norleucine
  MOD_RES (9)..(9): Alpha-Me S5-pentenyl-alanine olefin amino acid connected by an all-carbon crosslinker comprising one double bond
  C-term NH2
FAAYWELLAAA

SEQ ID NO: 1186 - protein, 11 aa, Artificial Sequence
  Description of Artificial Sequence: Synthetic peptide
  N-term Ac
  MOD_RES (2)..(2): Alpha-Me R8-octenyl-alanine olefin amino acid connected by an all-carbon crosslinker comprising one double bond
  misc_feature (2)..(9): Crosslink between residues
  MOD_RES (7)..(7): Ac3c
  MOD_RES (9)..(9): Alpha-Me S5-pentenyl-alanine olefin amino acid connected by an all-carbon crosslinker comprising one double bond
  MOD_RES (10)..(10): Abu
  C-term NH2
FAAYWEXLAXA

SEQ ID NO: 1187 - protein, 11 aa, Artificial Sequence
  Description of Artificial Sequence: Synthetic peptide
  N-term Ac
  MOD_RES (2)..(2): Alpha-Me R8-octenyl-alanine olefin amino acid connected by an all-carbon crosslinker comprising one double bond
  misc_feature (2)..(9): Crosslink between residues
  MOD_RES (7)..(7): Ac3c
  MOD_RES (9)..(9): Alpha-Me S5-pentenyl-alanine olefin amino acid connected by an all-carbon crosslinker comprising one double bond
  MOD_RES (10)..(10): Norleucine
  C-term NH2
FAAYWEXLALA

SEQ ID NO: 1188 - protein, 11 aa, Artificial Sequence
  Description of Artificial Sequence: Synthetic peptide
  N-term Ac
  MOD_RES (2)..(2): Alpha-Me R8-octenyl-alanine olefin amino acid connected by an all-carbon crosslinker comprising one double bond
  misc_feature (2)..(9): Crosslink between residues
  MOD_RES (7)..(7): 2-aminoisobutyric acid
  MOD_RES (9)..(9): Alpha-Me S5-pentenyl-alanine olefin amino acid connected by an all-carbon crosslinker comprising one double bond
  MOD_RES (10)..(10): Norleucine
  C-term NH2
FAAYWEXLALA

SEQ ID NO: 1189 - protein, 11 aa, Artificial Sequence
  Description of Artificial Sequence: Synthetic peptide
  N-term Ac
  MOD_RES (2)..(2): Alpha-Me R8-octenyl-alanine olefin amino acid connected by an all-carbon crosslinker comprising one double bond
  misc_feature (2)..(9): Crosslink between residues
  MOD_RES (9)..(9): Alpha-Me S5-pentenyl-alanine olefin amino acid connected by an all-carbon crosslinker comprising one double bond
  MOD_RES (10)..(10): Norleucine
  C-term NH2
FAAYWEALALA

SEQ ID NO: 1190 - protein, 11 aa, Artificial Sequence
  Description of Artificial Sequence: Synthetic peptide
  N-term Ac
  MOD_RES (2)..(2): Alpha-Me R8-octenyl-alanine olefin amino acid connected by an all-carbon crosslinker comprising one double bond
  misc_feature (2)..(9): Crosslink between residues
  MOD_RES (7)..(7): Norleucine
  MOD_RES (9)..(9): Alpha-Me S5-pentenyl-alanine olefin amino acid connected by an all-carbon crosslinker comprising one double bond
  MOD_RES (10)..(10): Norleucine
  C-term NH2
FAAYWELLALA

SEQ ID NO: 1191 - protein, 10 aa, Artificial Sequence
  Description of Artificial Sequence: Synthetic peptide
  N-term Ac
  MOD_RES (2)..(2): Alpha-Me R8-octenyl-alanine olefin amino acid connected by an all-carbon crosslinker comprising one double bond
  misc_feature (2)..(9): Crosslink between residues
  MOD_RES (7)..(7): 2-aminoisobutyric acid
  MOD_RES (9)..(9): Alpha-Me S5-pentenyl-alanine olefin amino acid connected by an all-carbon crosslinker comprising one double bond
  MOD_RES (10)..(10): Abu
  C-term NH2
FAAYWEXLAX

SEQ ID NO: 1192 - protein, 10 aa, Artificial Sequence
  Description of Artificial Sequence: Synthetic peptide
  N-term Ac
  MOD_RES (2)..(2): Alpha-Me R8-octenyl-alanine olefin amino acid connected by an all-carbon crosslinker comprising one double bond
  misc_feature (2)..(9): Crosslink between residues
  MOD_RES (7)..(7): Norleucine
  MOD_RES (9)..(9): Alpha-Me S5-pentenyl-alanine olefin amino acid connected by an all-carbon crosslinker comprising one double bond
  MOD_RES (10)..(10): Abu
  C-term NH2
FAAYWELLAX

SEQ ID NO: 1193 - protein, 10 aa, Artificial Sequence
  Description of Artificial Sequence: Synthetic peptide
  N-term Ac
  MOD_RES (2)..(2): Alpha-Me R8-octenyl-alanine olefin amino acid connected by an all-carbon crosslinker comprising one double bond
  misc_feature (2)..(9): Crosslink between residues
  MOD_RES (9)..(9): Alpha-Me S5-pentenyl-alanine olefin amino acid connected by an all-carbon crosslinker comprising one double bond
  MOD_RES (10)..(10): Abu
  C-term NH2
FAAYWEALAX

SEQ ID NO: 1194 - protein, 12 aa, Artificial Sequence
  Description of Artificial Sequence: Synthetic peptide
  N-term Ac
  MOD_RES (4)..(4): Alpha-Me R8-octenyl-alanine olefin amino acid connected by an all-carbon crosslinker comprising one double bond
  misc_feature (4)..(11): Crosslink between residues
  MOD_RES (11)..(11): Alpha-Me S5-pentenyl-alanine olefin amino acid connected by an all-carbon crosslinker comprising one double bond
  C-term NH2
LTFAAFWAQLAS

SEQ ID NO: 1195 - protein, 12 aa, Artificial Sequence
  Description of Artificial Sequence: Synthetic peptide
  N-term Ac
  MOD_RES (4)..(4): Alpha-Me R8-octenyl-alanine olefin amino acid connected by an all-carbon crosslinker comprising one double bond
  misc_feature (4)..(11): Crosslink between residues
  MOD_RES (11)..(11): Alpha-Me S5-pentenyl-alanine olefin amino acid connected by an all-carbon crosslinker comprising one double bond
  C-term NH2
LTFAAWWAQLAS

SEQ ID NO: 1196 - protein, 12 aa, Artificial Sequence
  Description of Artificial Sequence: Synthetic peptide
  N-term Ac
  MOD_RES (4)..(4): Alpha-Me R8-octenyl-alanine olefin amino acid connected by an all-carbon crosslinker comprising one double bond
  misc_feature (4)..(11): Crosslink between residues
  MOD_RES (11)..(11): Alpha-Me S5-pentenyl-alanine olefin amino acid connected by an all-carbon crosslinker comprising one double bond
  C-term NH2
LTFAAYWAQIAS

SEQ ID NO: 1197 - protein, 12 aa, Artificial Sequence
  Description of Artificial Sequence: Synthetic peptide
  N-term Ac
  MOD_RES (4)..(4): Alpha-Me R8-octenyl-alanine olefin amino acid connected by an all-carbon crosslinker comprising one double bond
  misc_feature (4)..(11): Crosslink between residues
  MOD_RES (10)..(10): Norleucine
  MOD_RES (11)..(11): Alpha-Me S5-pentenyl-alanine olefin amino acid connected by an all-carbon crosslinker comprising one double bond
  C-term NH2
LTFAAYWAQLAS

SEQ ID NO: 1198 - protein, 13 aa, Artificial Sequence
  Description of Artificial Sequence: Synthetic peptide
  N-term Ac
  MOD_RES (4)..(4): Alpha-Me R8-octenyl-alanine olefin amino acid connected by an all-carbon crosslinker comprising one double bond
  misc_feature (4)..(11): Crosslink between residues
  MOD_RES (11)..(11): Alpha-Me S5-pentenyl-alanine olefin amino acid connected by an all-carbon crosslinker comprising one double bond
  C-term NH2
LTFAAYWAQLASA

SEQ ID NO: 1199 - protein, 12 aa, Artificial Sequence
  Description of Artificial Sequence: Synthetic peptide
  N-term Ac
  MOD_RES (4)..(4): Alpha-Me R8-octenyl-alanine olefin amino acid connected by an all-carbon crosslinker comprising one double bond
  misc_feature (4)..(11): Crosslink between residues
  MOD_RES (11)..(11): Alpha-Me S5-pentenyl-alanine olefin amino acid connected by an all-carbon crosslinker comprising one double bond
  C-term NH2
LTFAAWWAQLAA

SEQ ID NO: 1200 - protein, 12 aa, Artificial Sequence
  Description of Artificial Sequence: Synthetic peptide
  N-term Ac
  MOD_RES (4)..(4): Alpha-Me R8-octenyl-alanine olefin amino acid connected by an all-carbon crosslinker comprising one double bond
  misc_feature (4)..(11): Crosslink between residues
  MOD_RES (11)..(11): Alpha-Me S5-pentenyl-alanine olefin amino acid connected by an all-carbon crosslinker comprising one double bond
  C-term NH2
LTFAAYWAQIAA

SEQ ID NO: 1201 - protein, 12 aa, Artificial Sequence
  Description of Artificial Sequence: Synthetic peptide
  N-term Ac
  MOD_RES (4)..(4): Alpha-Me R8-octenyl-alanine olefin amino acid connected by an all-carbon crosslinker comprising one double bond
  misc_feature (4)..(11): Crosslink between residues
  MOD_RES (10)..(10): Norleucine
  MOD_RES (11)..(11): Alpha-Me S5-pentenyl-alanine olefin amino acid connected by an all-carbon crosslinker comprising one double bond
  C-term NH2
LTFAAYWAQLAA

SEQ ID NO: 1202 - protein, 13 aa, Artificial Sequence
  Description of Artificial Sequence: Synthetic peptide
  N-term Ac
  MOD_RES (4)..(4): Alpha-Me R8-octenyl-alanine olefin amino acid connected by an all-carbon crosslinker comprising one double bond
  misc_feature (4)..(11): Crosslink between residues
  MOD_RES (11)..(11): Alpha-Me S5-pentenyl-alanine olefin amino acid connected by an all-carbon crosslinker comprising one double bond
  C-term NH2
LTFAAYWAQLAAA

SEQ ID NO: 1203 - protein, 12 aa, Artificial Sequence
  Description of Artificial Sequence: Synthetic peptide
  N-term Ac
  MOD_RES (4)..(4): Alpha-Me R8-octenyl-alanine olefin amino acid connected by an all-carbon crosslinker comprising one double bond
  misc_feature (4)..(11): Crosslink between residues
  MOD_RES (11)..(11): Alpha-Me S5-pentenyl-alanine olefin amino acid connected by an all-carbon crosslinker comprising one double bond
  C-term NH2
LTFAHWWAQLAS

SEQ ID NO: 1204 - protein, 12 aa, Artificial Sequence
  Description of Artificial Sequence: Synthetic peptide
  N-term Ac
  MOD_RES (4)..(4): Alpha-Me R8-octenyl-alanine olefin amino acid connected by an all-carbon crosslinker comprising one double bond
  misc_feature (4)..(11): Crosslink between residues
  MOD_RES (11)..(11): Alpha-Me S5-pentenyl-alanine olefin amino acid connected by an all-carbon crosslinker comprising one double bond
  C-term NH2
LTFAHRWAQLAS

SEQ ID NO: 1205 - protein, 12 aa, Artificial Sequence
  Description of Artificial Sequence: Synthetic peptide
  N-term Ac
  MOD_RES (4)..(4): Alpha-Me R8-octenyl-alanine olefin amino acid connected by an all-carbon crosslinker comprising one double bond
  misc_feature (4)..(11): Crosslink between residues
  MOD_RES (11)..(11): Alpha-Me S5-pentenyl-alanine olefin amino acid connected by an all-carbon crosslinker comprising one double bond
  C-term NH2
LTFAHKWAQLAS

SEQ ID NO: 1206 - protein, 12 aa, Artificial Sequence
  Description of Artificial Sequence: Synthetic peptide
  N-term Ac
  MOD_RES (4)..(4): Alpha-Me R8-octenyl-alanine olefin amino acid connected by an all-carbon crosslinker comprising one double bond
  misc_feature (4)..(11): Crosslink between residues
  MOD_RES (11)..(11): Alpha-Me S5-pentenyl-alanine olefin amino acid connected by an all-carbon crosslinker comprising one double bond
  C-term NH2
LTFAHYWAQLAW

SEQ ID NO: 1207 - protein, 10 aa, Artificial Sequence
  Description of Artificial Sequence: Synthetic peptide
  N-term Ac
  MOD_RES (2)..(2): Alpha-Me R8-octenyl-alanine olefin amino acid connected by an all-carbon crosslinker comprising one double bond
  misc_feature (2)..(9): Crosslink between residues
  MOD_RES (6)..(6): Abu
  MOD_RES (9)..(9): Alpha-Me S5-pentenyl-alanine olefin amino acid connected by an all-carbon crosslinker comprising one double bond
  C-term NH2
FAAYWXALAA

SEQ ID NO: 1208 - protein, 10 aa, Artificial Sequence
  Description of Artificial Sequence: Synthetic peptide
  N-term Ac
  MOD_RES (2)..(2): Alpha-Me R8-octenyl-alanine olefin amino acid connected by an all-carbon crosslinker comprising one double bond
  misc_feature (2)..(9): Crosslink between residues
  MOD_RES (3)..(3): Abu
  MOD_RES (9)..(9): Alpha-Me S5-pentenyl-alanine olefin amino acid connected by an all-carbon crosslinker comprising one double bond
  C-term NH2
FAXYWEALAA

SEQ ID NO: 1209 - protein, 14 aa, Artificial Sequence
  Description of Artificial Sequence: Synthetic peptide
  N-term Ac
  MOD_RES (1)..(1): Norleucine
  MOD_RES (5)..(5): Alpha-Me R8-octenyl-alanine olefin amino acid connected by an all-carbon crosslinker comprising no double bonds
  misc_feature (5)..(12): Crosslink between residues
  MOD_RES (12)..(12): Alpha-Me S5-pentenyl-alanine olefin amino acid connected by an all-carbon crosslinker comprising no double bonds
  C-term NH2
LPRFANYWRLLAQN

SEQ ID NO: 1210 - protein, 12 aa, Artificial Sequence
  Description of Artificial Sequence: Synthetic peptide
  N-term Ac
  MOD_RES (4)..(4): Alpha-Me R8-octenyl-alanine olefin amino acid connected by an all-carbon crosslinker comprising no double bonds
  misc_feature (4)..(11): Crosslink between residues
  MOD_RES (11)..(11): Alpha-Me S5-pentenyl-alanine olefin amino acid connected by an all-carbon crosslinker comprising no double bonds
  C-term NH2
TSFAHYWAQLAS

SEQ ID NO: 1211 - protein, 12 aa, Artificial Sequence
  Description of Artificial Sequence: Synthetic peptide
  N-term Ac
  MOD_RES (4)..(4): Alpha-Me R8-octenyl-alanine olefin amino acid connected by an all-carbon crosslinker comprising no double bonds
  misc_feature (4)..(11): Crosslink between residues
  MOD_RES (11)..(11): Alpha-Me S5-pentenyl-alanine olefin amino acid connected by an all-carbon crosslinker comprising no double bonds
  C-term NH2
LTFAAYWAQLAS

SEQ ID NO: 1212 - protein, 12 aa, Artificial Sequence
  Description of Artificial Sequence: Synthetic peptide
  N-term Ac
  MOD_RES (4)..(4): Alpha-Me R8-octenyl-alanine olefin amino acid connected by an all-carbon crosslinker comprising one double bond
  misc_feature (4)..(11): Crosslink between residues
  MOD_RES (11)..(11): Alpha-Me S5-pentenyl-alanine olefin amino acid connected by an all-carbon crosslinker comprising one double bond
  C-term NH2
HTFAHYWAQLAS

SEQ ID NO: 1213 - protein, 12 aa, Artificial Sequence
  Description of Artificial Sequence: Synthetic peptide
  N-term Ac
  MOD_RES (4)..(4): Alpha-Me R8-octenyl-alanine olefin amino acid connected by an all-carbon crosslinker comprising one double bond
  misc_feature (4)..(11): Crosslink between residues
  MOD_RES (11)..(11): Alpha-Me S5-pentenyl-alanine olefin amino acid connected by an all-carbon crosslinker comprising one double bond
  C-term NH2
LHFAHYWAQLAS

SEQ ID NO: 1214 - protein, 12 aa, Artificial Sequence
  Description of Artificial Sequence: Synthetic peptide
  N-term Ac
  MOD_RES (4)..(4): Alpha-Me R8-octenyl-alanine olefin amino acid connected by an all-carbon crosslinker comprising one double bond
  misc_feature (4)..(11): Crosslink between residues
  MOD_RES (11)..(11): Alpha-Me S5-pentenyl-alanine olefin amino acid connected by an all-carbon crosslinker comprising one double bond
  C-term NH2
LTFAHHWAQLAS

SEQ ID NO: 1215 - protein, 12 aa, Artificial Sequence
  Description of Artificial Sequence: Synthetic peptide
  N-term Ac
  MOD_RES (4)..(4): Alpha-Me R8-octenyl-alanine olefin amino acid connected by an all-carbon crosslinker comprising one double bond
  misc_feature (4)..(11): Crosslink between residues
  MOD_RES (11)..(11): Alpha-Me S5-pentenyl-alanine olefin amino acid connected by an all-carbon crosslinker comprising one double bond
  C-term NH2
LTFAHYWHQLAS

SEQ ID NO: 1216 - protein, 12 aa, Artificial Sequence
  Description of Artificial Sequence: Synthetic peptide
  N-term Ac
  MOD_RES (4)..(4): Alpha-Me R8-octenyl-alanine olefin amino acid connected by an all-carbon crosslinker comprising one double bond
  misc_feature (4)..(11): Crosslink between residues
  MOD_RES (11)..(11): Alpha-Me S5-pentenyl-alanine olefin amino acid connected by an all-carbon crosslinker comprising one double bond
  C-term NH2
LTFAHYWAHLAS

SEQ ID NO: 1217 - protein, 12 aa, Artificial Sequence
  Description of Artificial Sequence: Synthetic peptide
  N-term Ac
  MOD_RES (4)..(4): Alpha-Me R8-octenyl-alanine olefin amino acid connected by an all-carbon crosslinker comprising one double bond
  misc_feature (4)..(11): Crosslink between residues
  MOD_RES (11)..(11): Alpha-Me S5-pentenyl-alanine olefin amino acid connected by an all-carbon crosslinker comprising one double bond
  C-term NH2
LTFAHYWAQLAH

SEQ ID NO: 1218 - protein, 12 aa, Artificial Sequence
  Description of Artificial Sequence: Synthetic peptide
  N-term Ac
  MOD_RES (4)..(4): Alpha-Me R8-octenyl-alanine olefin amino acid connected by an all-carbon crosslinker comprising one double bond
  misc_feature (4)..(11): Crosslink between residues
  MOD_RES (11)..(11): Alpha-Me S5-pentenyl-alanine olefin amino acid connected by an all-carbon crosslinker comprising one double bond
  C-term NHPr
LTFAHYWAQLAS

SEQ ID NO: 1219 - protein, 12 aa, Artificial Sequence
  Description of Artificial Sequence: Synthetic peptide
  N-term Ac
  MOD_RES (4)..(4): Alpha-Me R8-octenyl-alanine olefin amino acid connected by an all-carbon crosslinker comprising one double bond
  misc_feature (4)..(11): Crosslink between residues
  MOD_RES (11)..(11): Alpha-Me S5-pentenyl-alanine olefin amino acid connected by an all-carbon crosslinker comprising one double bond
  C-term NHsBu
LTFAHYWAQLAS

SEQ ID NO: 1220 - protein, 12 aa, Artificial Sequence
  Description of Artificial Sequence: Synthetic peptide
  N-term Ac
  MOD_RES (4)..(4): Alpha-Me R8-octenyl-alanine olefin amino acid connected by an all-carbon crosslinker comprising one double bond
  misc_feature (4)..(11): Crosslink between residues
  MOD_RES (11)..(11): Alpha-Me S5-pentenyl-alanine olefin amino acid connected by an all-carbon crosslinker comprising one double bond
  C-term NHiBu
LTFAHYWAQLAS

SEQ ID NO: 1221 - protein, 12 aa, Artificial Sequence
  Description of Artificial Sequence: Synthetic peptide
  N-term Ac
  MOD_RES (4)..(4): Alpha-Me R8-octenyl-alanine olefin amino acid connected by an all-carbon crosslinker comprising one double bond
  misc_feature (4)..(11): Crosslink between residues
  MOD_RES (11)..(11): Alpha-Me S5-pentenyl-alanine olefin amino acid connected by an all-carbon crosslinker comprising one double bond
  C-term NHBn
LTFAHYWAQLAS

SEQ ID NO: 1222 - protein, 12 aa, Artificial Sequence
  Description of Artificial Sequence: Synthetic peptide
  N-term Ac
  MOD_RES (4)..(4): Alpha-Me R8-octenyl-alanine olefin amino acid connected by an all-carbon crosslinker comprising one double bond
  misc_feature (4)..(11): Crosslink between residues
  MOD_RES (11)..(11): Alpha-Me S5-pentenyl-alanine olefin amino acid connected by an all-carbon crosslinker comprising one double bond
  C-term NHPe
LTFAHYWAQLAS

SEQ ID NO: 1223 - protein, 12 aa, Artificial Sequence
  Description of Artificial Sequence: Synthetic peptide
  N-term Ac
  MOD_RES (4)..(4): Alpha-Me R8-octenyl-alanine olefin amino acid connected by an all-carbon crosslinker comprising one double bond
  misc_feature (4)..(11): Crosslink between residues
  MOD_RES (11)..(11): Alpha-Me S5-pentenyl-alanine olefin amino acid connected by an all-carbon crosslinker comprising one double bond
  C-term NHChx
LTFAHYWAQLAS

SEQ ID NO: 1224 - protein, 12 aa, Artificial Sequence
  Description of Artificial Sequence: Synthetic peptide
  N-term Ac
  MOD_RES (4)..(4): Alpha-Me R8-octenyl-alanine olefin amino acid connected by an all-carbon crosslinker comprising one double bond
  misc_feature (4)..(11): Crosslink between residues
  MOD_RES (11)..(11): Alpha-Me S5-pentenyl-alanine olefin amino acid connected by an all-carbon crosslinker comprising one double bond
  C-term NH2
ETFAAYWAQLAS

SEQ ID NO: 1225 - protein, 12 aa, Artificial Sequence
  Description of Artificial Sequence: Synthetic peptide
  N-term Ac
  MOD_RES (4)..(4): Alpha-Me R8-octenyl-alanine olefin amino acid connected by an all-carbon crosslinker comprising one double bond
  misc_feature (4)..(11): Crosslink between residues
  MOD_RES (11)..(11): Alpha-Me S5-pentenyl-alanine olefin amino acid connected by an all-carbon crosslinker comprising one double bond
  C-term NH2
STFAAYWAQLAS

SEQ ID NO: 1226 - protein, 12 aa, Artificial Sequence
  Description of Artificial Sequence: Synthetic peptide
  N-term Ac
  MOD_RES (4)..(4): Alpha-Me R8-octenyl-alanine olefin amino acid connected by an all-carbon crosslinker comprising one double bond
  misc_feature (4)..(11): Crosslink between residues
  MOD_RES (11)..(11): Alpha-Me S5-pentenyl-alanine olefin amino acid connected by an all-carbon crosslinker comprising one double bond
  C-term NH2
LEFAAYWAQLAS

SEQ ID NO: 1227 - protein, 12 aa, Artificial Sequence
  Description of Artificial Sequence: Synthetic peptide
  N-term Ac
  MOD_RES (4)..(4): Alpha-Me R8-octenyl-alanine olefin amino acid connected by an all-carbon crosslinker comprising one double bond
  misc_feature (4)..(11): Crosslink between residues
  MOD_RES (11)..(11): Alpha-Me S5-pentenyl-alanine olefin amino acid connected by an all-carbon crosslinker comprising one double bond
  C-term NH2
LSFAAYWAQLAS

SEQ ID NO: 1228 - protein, 12 aa, Artificial Sequence
  Description of Artificial Sequence: Synthetic peptide
  N-term Ac
  MOD_RES (4)..(4): Alpha-Me R8-octenyl-alanine olefin amino acid connected by an all-carbon crosslinker comprising one double bond
  misc_feature (4)..(11): Crosslink between residues
  MOD_RES (11)..(11): Alpha-Me S5-pentenyl-alanine olefin amino acid connected by an all-carbon crosslinker comprising one double bond
  C-term NH2
LTFAEYWAQLAS

SEQ ID NO: 1229 - protein, 12 aa, Artificial Sequence
  Description of Artificial Sequence: Synthetic peptide
  N-term Ac
  MOD_RES (4)..(4): Alpha-Me R8-octenyl-alanine olefin amino acid connected by an all-carbon crosslinker comprising one double bond
  misc_feature (4)..(11): Crosslink between residues
  MOD_RES (11)..(11): Alpha-Me S5-pentenyl-alanine olefin amino acid connected by an all-carbon crosslinker comprising one double bond
  C-term NH2
LTFASYWAQLAS

SEQ ID NO: 1230 - protein, 12 aa, Artificial Sequence
  Description of Artificial Sequence: Synthetic peptide
  N-term Ac
  MOD_RES (4)..(4): Alpha-Me R8-octenyl-alanine olefin amino acid connected by an all-carbon crosslinker comprising one double bond
  misc_feature (4)..(11): Crosslink between residues
  MOD_RES (11)..(11): Alpha-Me S5-pentenyl-alanine olefin amino acid connected by an all-carbon crosslinker comprising one double bond
  C-term NH2
LTFAAYWEQLAS

SEQ ID NO: 1231 - protein, 12 aa, Artificial Sequence
  Description of Artificial Sequence: Synthetic peptide
  N-term Ac
  MOD_RES (4)..(4): Alpha-Me R8-octenyl-alanine olefin amino acid connected by an all-carbon crosslinker comprising one double bond
  misc_feature (4)..(11): Crosslink between residues
  MOD_RES (11)..(11): Alpha-Me S5-pentenyl-alanine olefin amino acid connected by an all-carbon crosslinker comprising one double bond
  C-term NH2
LTFAAYWAELAS

SEQ ID NO: 1232 - protein, 12 aa, Artificial Sequence
  Description of Artificial Sequence: Synthetic peptide
  N-term Ac
  MOD_RES (4)..(4): Alpha-Me R8-octenyl-alanine olefin amino acid connected by an all-carbon crosslinker comprising one double bond
  misc_feature (4)..(11): Crosslink between residues
  MOD_RES (11)..(11): Alpha-Me S5-pentenyl-alanine olefin amino acid connected by an all-carbon crosslinker comprising one double bond
  C-term NH2
LTFAAYWASLAS

SEQ ID NO: 1233 - protein, 12 aa, Artificial Sequence
  Description of Artificial Sequence: Synthetic peptide
  N-term Ac
  MOD_RES (4)..(4): Alpha-Me R8-octenyl-alanine olefin amino acid connected by an all-carbon crosslinker comprising one double bond
  misc_feature (4)..(11): Crosslink between residues
  MOD_RES (11)..(11): Alpha-Me S5-pentenyl-alanine olefin amino acid connected by an all-carbon crosslinker comprising one double bond
  C-term NH2
LTFAAYWAQLAE

SEQ ID NO: 1234 - protein, 12 aa, Artificial Sequence
  Description of Artificial Sequence: Synthetic peptide
  N-term Ac
  MOD_RES (3)..(3): Phe-2CN
  MOD_RES (4)..(4): Alpha-Me R8-octenyl-alanine olefin amino acid connected by an all-carbon crosslinker comprising one double bond
  misc_feature (4)..(11): Crosslink between residues
  MOD_RES (11)..(11): Alpha-Me S5-pentenyl-alanine olefin amino acid connected by an all-carbon crosslinker comprising one double bond
  C-term NH2
LTFAHYWAQLAS

SEQ ID NO: 1235 - protein, 12 aa, Artificial Sequence
  Description of Artificial Sequence: Synthetic peptide
  N-term Ac
  MOD_RES (3)..(3): 3-Chloro-Phe
  MOD_RES (4)..(4): Alpha-Me R8-octenyl-alanine olefin amino acid connected by an all-carbon crosslinker comprising one double bond
  misc_feature (4)..(11): Crosslink between residues
  MOD_RES (11)..(11): Alpha-Me S5-pentenyl-alanine olefin amino acid connected by an all-carbon crosslinker comprising one double bond
  C-term NH2
LTFAHYWAQLAS

SEQ ID NO: 1236 - protein, 12 aa, Artificial Sequence
  Description of Artificial Sequence: Synthetic peptide
  N-term Ac
  MOD_RES (3)..(3): 3,3-di-Phe
  MOD_RES (4)..(4): Alpha-Me R8-octenyl-alanine olefin amino acid connected by an all-carbon crosslinker comprising one double bond
  misc_feature (4)..(11): Crosslink between residues
  MOD_RES (11)..(11): Alpha-Me S5-pentenyl-alanine olefin amino acid connected by an all-carbon crosslinker comprising one double bond
  C-term NH2
LTXAHYWAQLAS

SEQ ID NO: 1237 - protein, 12 aa, Artificial Sequence
  Description of Artificial Sequence: Synthetic peptide
  N-term Ac
  MOD_RES (4)..(4): Alpha-Me R8-octenyl-alanine olefin amino acid connected by an all-carbon crosslinker comprising one double bond
  misc_feature (4)..(11): Crosslink between residues
  MOD_RES (10)..(10): Tert-butyl-Gly
  MOD_RES (11)..(11): Alpha-Me S5-pentenyl-alanine olefin amino acid connected by an all-carbon crosslinker comprising one double bond
  C-term NH2
LTFAHYWAQGAS

SEQ ID NO: 1238 - protein, 10 aa, Artificial Sequence
  Description of Artificial Sequence: Synthetic peptide
  N-term Ac
  MOD_RES (2)..(2): Alpha-Me R8-octenyl-alanine olefin amino acid connected by an all-carbon crosslinker comprising one double bond
  misc_feature (2)..(9): Crosslink between residues
  MOD_RES (5)..(5): 6cl-Trp
  MOD_RES (9)..(9): Alpha-Me S5-pentenyl-alanine olefin amino acid connected by an all-carbon crosslinker comprising one double bond
  C-term NH2
FAAYWEALAA

SEQ ID NO: 1239 - protein, 10 aa, Artificial Sequence
  Description of Artificial Sequence: Synthetic peptide
  N-term Ac
  MOD_RES (2)..(2): Alpha-Me R8-octenyl-alanine olefin amino acid connected by an all-carbon crosslinker comprising one double bond
  misc_feature (2)..(9): Crosslink between residues
  MOD_RES (5)..(5): dl6br-Trp
  MOD_RES (9)..(9): Alpha-Me S5-pentenyl-alanine olefin amino acid connected by an all-carbon crosslinker comprising one double bond
  C-term NH2
FAAYWEALAA

SEQ ID NO: 1240 - protein, 10 aa, Artificial Sequence
  Description of Artificial Sequence: Synthetic peptide
  N-term Ac
  MOD_RES (2)..(2): Alpha-Me R8-octenyl-alanine olefin amino acid connected by an all-carbon crosslinker comprising one double bond
  misc_feature (2)..(9): Crosslink between residues
  MOD_RES (5)..(5): dl6f-Trp
  MOD_RES (9)..(9): Alpha-Me S5-pentenyl-alanine olefin amino acid connected by an all-carbon crosslinker comprising one double bond
  C-term NH2
FAAYWEALAA

SEQ ID NO: 1241 - protein, 10 aa, Artificial Sequence
  Description of Artificial Sequence: Synthetic peptide
  N-term Ac
  MOD_RES (2)..(2): Alpha-Me R8-octenyl-alanine olefin amino acid connected by an all-carbon crosslinker comprising one double bond
  misc_feature (2)..(9): Crosslink between residues
  MOD_RES (5)..(5): dl4m-Trp
  MOD_RES (9)..(9): Alpha-Me S5-pentenyl-alanine olefin amino acid connected by an all-carbon crosslinker comprising one double bond
  C-term NH2
FAAYWEALAA

SEQ ID NO: 1242 - protein, 10 aa, Artificial Sequence
  Description of Artificial Sequence: Synthetic peptide
  N-term Ac
  MOD_RES (2)..(2): Alpha-Me R8-octenyl-alanine olefin amino acid connected by an all-carbon crosslinker comprising one double bond
  misc_feature (2)..(9): Crosslink between residues
  MOD_RES (5)..(5): dl5cl-Trp
  MOD_RES (9)..(9): Alpha-Me S5-pentenyl-alanine olefin amino acid connected by an all-carbon crosslinker comprising one double bond
  C-term NH2
FAAYWEALAA

SEQ ID NO: 1243 - protein, 10 aa, Artificial Sequence
  Description of Artificial Sequence: Synthetic peptide
  N-term Ac
  MOD_RES (2)..(2): Alpha-Me R8-octenyl-alanine olefin amino acid connected by an all-carbon crosslinker comprising one double bond
  misc_feature (2)..(9): Crosslink between residues
  MOD_RES (5)..(5): dl7m-Trp
  MOD_RES (9)..(9): Alpha-Me S5-pentenyl-alanine olefin amino acid connected by an all-carbon crosslinker comprising one double bond
  C-term NH2
FAAYWEALAA

SEQ ID NO: 1244 - protein, 12 aa, Artificial Sequence
  Description of Artificial Sequence: Synthetic peptide
  N-term Ac
  MOD_RES (4)..(4): Alpha-Me R8-octenyl-alanine olefin amino acid connected by an all-carbon crosslinker comprising no double bonds
  misc_feature (4)..(11): Crosslink between residues
  MOD_RES (11)..(11): Alpha-Me S5-pentenyl-alanine olefin amino acid connected by an all-carbon crosslinker comprising no double bonds
  C-term NH2
LTFAHYWAQLAA

SEQ ID NO: 1245 - protein, 12 aa, Artificial Sequence
  Description of Artificial Sequence: Synthetic peptide
  N-term Ac
  MOD_RES (4)..(4): Alpha-Me R8-octenyl-alanine olefin amino acid connected by an all-carbon crosslinker comprising one double bond
  misc_feature (4)..(11): Crosslink between residues
  MOD_RES (6)..(6): Cou
  MOD_RES (11)..(11): Alpha-Me S5-pentenyl-alanine olefin amino acid connected by an all-carbon crosslinker comprising one double bond
  C-term NH2
LTFAHXWAQLAS

SEQ ID NO: 1246 - protein, 12 aa, Artificial Sequence
  Description of Artificial Sequence: Synthetic peptide
  N-term Ac
  MOD_RES (6)..(6): Cou
  C-term NH2
LTFEHXWAQLTS

SEQ ID NO: 1247 - protein, 12 aa, Artificial Sequence
  Description of Artificial Sequence: Synthetic peptide
  N-term Ac
  MOD_RES (4)..(4): Alpha-Me R8-octenyl-alanine olefin amino acid connected by an all-carbon crosslinker comprising one double bond
  misc_feature (4)..(11): Crosslink between residues
  MOD_RES (6)..(6): Cou
  MOD_RES (11)..(11): Alpha-Me S5-pentenyl-alanine olefin amino acid connected by an all-carbon crosslinker comprising one double bond
  C-term NH2
LTAAHXWAQLAS

SEQ ID NO: 1248 - protein, 11 aa, Artificial Sequence
  Description of Artificial Sequence: Synthetic peptide
  N-term Ac
  MOD_RES (2)..(2): Alpha-Me R8-octenyl-alanine olefin amino acid connected by an all-carbon crosslinker comprising one double bond
  misc_feature (2)..(9): Crosslink between residues
  MOD_RES (9)..(9): Alpha-Me S5-pentenyl-alanine olefin amino acid connected by an all-carbon crosslinker comprising one double bond
  MOD_RES (10)..(10): Abu
  C-term NH2
FAAYWEALAXA

SEQ ID NO: 1249 - protein, 11 aa, Artificial Sequence
  Description of Artificial Sequence: Synthetic peptide
  N-term Ac
  MOD_RES (2)..(2): Alpha-Me R8-octenyl-alanine olefin amino acid connected by an all-carbon crosslinker comprising one double bond
  misc_feature (2)..(9): Crosslink between residues
  MOD_RES (9)..(9): Alpha-Me S5-pentenyl-alanine olefin amino acid connected by an all-carbon crosslinker comprising one double bond
  C-term NH2
FAAYWEAIAAA

SEQ ID NO: 1250 - protein, 11 aa, Artificial Sequence
  Description of Artificial Sequence: Synthetic peptide
  N-term Ac
  MOD_RES (2)..(2): Alpha-Me R8-octenyl-alanine olefin amino acid connected by an all-carbon crosslinker comprising one double bond
  misc_feature (2)..(9): Crosslink between residues
  MOD_RES (8)..(8): Norleucine
  MOD_RES (9)..(9): Alpha-Me S5-pentenyl-alanine olefin amino acid connected by an all-carbon crosslinker comprising one double bond
  C-term NH2
FAAYWEALAAA

SEQ ID NO: 1251 - protein, 11 aa, Artificial Sequence
  Description of Artificial Sequence: Synthetic peptide
  N-term Ac
  MOD_RES (2)..(2): Alpha-Me R8-octenyl-alanine olefin amino acid connected by an all-carbon crosslinker comprising one double bond
  misc_feature (2)..(9): Crosslink between residues
  MOD_RES (7)..(7): Alpha-Me-Leu
  MOD_RES (9)..(9): Alpha-Me S5-pentenyl-alanine olefin amino acid connected by an all-carbon crosslinker comprising one double bond
  C-term NH2
FAAYWELLAAA

SEQ ID NO: 1252 - protein, 11 aa, Artificial Sequence
  Description of Artificial Sequence: Synthetic peptide
  N-term Ac
  MOD_RES (2)..(2): Alpha-Me R8-octenyl-alanine olefin amino acid connected by an all-carbon crosslinker comprising one double bond
  misc_feature (2)..(9): Crosslink between residues
  MOD_RES (9)..(9): Alpha-Me S5-pentenyl-alanine olefin amino acid connected by an all-carbon crosslinker comprising one double bond
  C-term NH2
FAAYWQALAAA

SEQ ID NO: 1253 - protein, 11 aa, Artificial Sequence
  Description of Artificial Sequence: Synthetic peptide
  N-term Ac
  MOD_RES (2)..(2): Alpha-Me R8-octenyl-alanine olefin amino acid connected by an all-carbon crosslinker comprising one double bond
  misc_feature (2)..(9): Crosslink between residues
  MOD_RES (9)..(9): Alpha-Me S5-pentenyl-alanine olefin amino acid connected by an all-carbon crosslinker comprising one double bond
  C-term NH2
FAAYWAALAAA

SEQ ID NO: 1254 - protein, 11 aa, Artificial Sequence
  Description of Artificial Sequence: Synthetic peptide
  N-term Ac
  MOD_RES (2)..(2): Alpha-Me R8-octenyl-alanine olefin amino acid connected by an all-carbon crosslinker comprising one double bond
  misc_feature (2)..(9): Crosslink between residues
  MOD_RES (6)..(6): Abu
  MOD_RES (9)..(9): Alpha-Me S5-pentenyl-alanine olefin amino acid connected by an all-carbon crosslinker comprising one double bond
  C-term NH2
FAAYWXALAAA

SEQ ID NO: 1255 - protein, 11 aa, Artificial Sequence
  Description of Artificial Sequence: Synthetic peptide
  N-term Ac
  MOD_RES (2)..(2): Alpha-Me R8-octenyl-alanine olefin amino acid connected by an all-carbon crosslinker comprising one double bond
  misc_feature (2)..(9): Crosslink between residues
  MOD_RES (6)..(6): Norleucine
  MOD_RES (9)..(9): Alpha-Me S5-pentenyl-alanine olefin amino acid connected by an all-carbon crosslinker comprising one double bond
  C-term NH2
FAAYWLALAAA

SEQ ID NO: 1256 - protein, 11 aa, Artificial Sequence
  Description of Artificial Sequence: Synthetic peptide
  N-term Ac
  MOD_RES (2)..(2): Alpha-Me R8-octenyl-alanine olefin amino acid connected by an all-carbon crosslinker comprising one double bond
  misc_feature (2)..(9): Crosslink between residues
  MOD_RES (3)..(3): Abu
  MOD_RES (9)..(9): Alpha-Me S5-pentenyl-alanine olefin amino acid connected by an all-carbon crosslinker comprising one double bond
  C-term NH2
FAXYWEALAAA

SEQ ID NO: 1257 - protein, 11 aa, Artificial Sequence
  Description of Artificial Sequence: Synthetic peptide
  N-term Ac
  MOD_RES (2)..(2): Alpha-Me R8-octenyl-alanine olefin amino acid connected by an all-carbon crosslinker comprising one double bond
  misc_feature (2)..(9): Crosslink between residues
  MOD_RES (3)..(3): Norleucine
  MOD_RES (9)..(9): Alpha-Me S5-pentenyl-alanine olefin amino acid connected by an all-carbon crosslinker comprising one double bond
  C-term NH2
FALYWEALAAA

SEQ ID NO: 1258 - protein, 11 aa, Artificial Sequence
  Description of Artificial Sequence: Synthetic peptide
  N-term Ac
  MOD_RES (2)..(2): Alpha-Me R8-octenyl-alanine olefin amino acid connected by an all-carbon crosslinker comprising one double bond
  misc_feature (2)..(9): Crosslink between residues
  MOD_RES (9)..(9): Alpha-Me S5-pentenyl-alanine olefin amino acid connected by an all-carbon crosslinker comprising one double bond
  C-term NH2
FAFYWEALAAA

SEQ ID NO: 1259 - protein, 12 aa, Artificial Sequence
  Description of Artificial Sequence: Synthetic peptide
  N-term Ac
  MOD_RES (4)..(4): Alpha-Me R8-octenyl-alanine olefin amino acid connected by an all-carbon crosslinker comprising one double bond
  misc_feature (4)..(11): Crosslink between residues
  MOD_RES (10)..(10): hLeu
  MOD_RES (11)..(11): Alpha-Me S5-pentenyl-alanine olefin amino acid connected by an all-carbon crosslinker comprising one double bond
  C-term NH2
LTFAHYWAQLAS

SEQ ID NO: 1260 - protein, 12 aa, Artificial Sequence
  Description of Artificial Sequence: Synthetic peptide
  N-term Ac
  MOD_RES (4)..(4): Alpha-Me R8-octenyl-alanine olefin amino acid connected by an all-carbon crosslinker comprising one double bond
  misc_feature (4)..(11): Crosslink between residues
  MOD_RES (10)..(10): Adamantyl-Gly
  MOD_RES (11)..(11): Alpha-Me S5-pentenyl-alanine olefin amino acid connected by an all-carbon crosslinker comprising one double bond
  C-term NH2
LTFAHYWAQGAS

SEQ ID NO: 1261 - protein, 12 aa, Artificial Sequence
  Description of Artificial Sequence: Synthetic peptide
  N-term Ac
  MOD_RES (4)..(4): Alpha-Me R8-octenyl-alanine olefin amino acid connected by an all-carbon crosslinker comprising one double bond
  misc_feature (4)..(11): Crosslink between residues
  MOD_RES (10)..(10): Indanyl-Gly
  MOD_RES (11)..(11): Alpha-Me S5-pentenyl-alanine olefin amino acid connected by an all-carbon crosslinker comprising one double bond
  C-term NH2
LTFAHYWAQGAS

SEQ ID NO: 1262 - protein, 11 aa, Artificial Sequence
  Description of Artificial Sequence: Synthetic peptide
  N-term Ac
  MOD_RES (2)..(2): Alpha-Me R8-octenyl-alanine olefin amino acid connected by an all-carbon crosslinker comprising one double bond
  misc_feature (2)..(9): Crosslink between residues
  MOD_RES (9)..(9): Alpha-Me S5-pentenyl-alanine olefin amino acid connected by an all-carbon crosslinker comprising one double bond
  C-term NH2
FAAYWAQLAAA

SEQ ID NO: 1263 - protein, 12 aa, Artificial Sequence
  Description of Artificial Sequence: Synthetic peptide
  N-term Ac
  MOD_RES (4)..(4): Alpha-Me R8-octenyl-alanine olefin amino acid connected by an all-carbon crosslinker comprising one double bond
  misc_feature (4)..(11): Crosslink between residues
  MOD_RES (11)..(11): Alpha-Me S5-pentenyl-alanine olefin amino acid connected by an all-carbon crosslinker comprising one double bond
  C-term NH2
LTFAALWAQLAQ

SEQ ID NO: 1264 - protein, 11 aa, Artificial Sequence
  Description of Artificial Sequence: Synthetic peptide
  N-term Ac
  MOD_RES (2)..(2): Alpha-Me R8-octenyl-alanine olefin amino acid connected by an all-carbon crosslinker comprising one double bond
  misc_feature (2)..(9): Crosslink between residues
  MOD_RES (9)..(9): Alpha-Me S5-pentenyl-alanine olefin amino acid connected by an all-carbon crosslinker comprising one double bond
  C-term NH2
FAAYWEALAAA

SEQ ID NO: 1265 - protein, 11 aa, Artificial Sequence
  Description of Artificial Sequence: Synthetic peptide
  N-term Ac
  MOD_RES (2)..(2): Alpha-Me R8-octenyl-alanine olefin amino acid connected by an all-carbon crosslinker comprising one double bond
  misc_feature (2)..(9): Crosslink between residues
  MOD_RES (7)..(7): Norleucine
  MOD_RES (9)..(9): Alpha-Me S5-pentenyl-alanine olefin amino acid connected by an all-carbon crosslinker comprising one double bond
  C-term NH2
FAAYWELLAAA

SEQ ID NO: 1266 - protein, 10 aa, Artificial Sequence
  Description of Artificial Sequence: Synthetic peptide
  N-term Ac
  MOD_RES (2)..(2): Alpha-Me R8-octenyl-alanine olefin amino acid connected by an all-carbon crosslinker comprising one double bond
  misc_feature (2)..(9): Crosslink between residues
  MOD_RES (7)..(7): 2-aminoisobutyric acid
  MOD_RES (9)..(9): Alpha-Me S5-pentenyl-alanine olefin amino acid connected by an all-carbon crosslinker comprising one double bond
  MOD_RES (10)..(10): Abu
  C-term NH2
FAAYWEXLAX

SEQ ID NO: 1267 - protein, 10 aa, Artificial Sequence
  Description of Artificial Sequence: Synthetic peptide
  N-term Ac
  MOD_RES (2)..(2): Alpha-Me R8-octenyl-alanine olefin amino acid connected by an all-carbon crosslinker comprising one double bond
  misc_feature (2)..(9): Crosslink between residues
  MOD_RES (7)..(7): Norleucine
  MOD_RES (9)..(9): Alpha-Me S5-pentenyl-alanine olefin amino acid connected by an all-carbon crosslinker comprising one double bond
  MOD_RES (10)..(10): Abu
  C-term NH2
FAAYWELLAX

SEQ ID NO: 1268 - protein, 10 aa, Artificial Sequence
  Description of Artificial Sequence: Synthetic peptide
  N-term Ac
  MOD_RES (2)..(2): Alpha-Me R8-octenyl-alanine olefin amino acid connected by an all-carbon crosslinker comprising one double bond
  misc_feature (2)..(9): Crosslink between residues
  MOD_RES (9)..(9): Alpha-Me S5-pentenyl-alanine olefin amino acid connected by an all-carbon crosslinker comprising one double bond
  MOD_RES (10)..(10): Abu
  C-term NH2
FAAYWEALAX

SEQ ID NO: 1269 - protein, 11 aa, Artificial Sequence
  Description of Artificial Sequence: Synthetic peptide
  N-term Ac
  MOD_RES (2)..(2): Alpha-Me R8-octenyl-alanine olefin amino acid connected by an all-carbon crosslinker comprising one double bond
  misc_feature (2)..(9): Crosslink between residues
  MOD_RES (7)..(7): Ac3c
  MOD_RES (9)..(9): Alpha-Me S5-pentenyl-alanine olefin amino acid connected by an all-carbon crosslinker comprising one double bond
  MOD_RES (10)..(10): Abu
  C-term NH2
FAAYWEXLAXA

SEQ ID NO: 1270 - protein, 11 aa, Artificial Sequence
  Description of Artificial Sequence: Synthetic peptide
  N-term Ac
  MOD_RES (2)..(2): Alpha-Me R8-octenyl-alanine olefin amino acid connected by an all-carbon crosslinker comprising one double bond
  misc_feature (2)..(9): Crosslink between residues
  MOD_RES (7)..(7): Ac3c
  MOD_RES (9)..(9): Alpha-Me S5-pentenyl-alanine olefin amino acid connected by an all-carbon crosslinker comprising one double bond
  MOD_RES (10)..(10): Norleucine
  C-term NH2
FAAYWEXLALA

SEQ ID NO: 1271 - protein, 12 aa, Artificial Sequence
  Description of Artificial Sequence: Synthetic peptide
  N-term H
  MOD_RES (4)..(4): Alpha-Me R8-octenyl-alanine olefin amino acid connected by an all-carbon crosslinker comprising one double bond
  misc_feature (4)..(11): Crosslink between residues
  MOD_RES (11)..(11): Alpha-Me S5-pentenyl-alanine olefin amino acid connected by an all-carbon crosslinker comprising one double bond
  C-term NH2
LTFAAYWAQLAS

SEQ ID NO: 1272 - protein, 12 aa, Artificial Sequence
  Description of Artificial Sequence: Synthetic peptide
  N-term mdPEG3
  MOD_RES (4)..(4): Alpha-Me R8-octenyl-alanine olefin amino acid connected by an all-carbon crosslinker comprising one double bond
  misc_feature (4)..(11): Crosslink between residues
  MOD_RES (11)..(11): Alpha-Me S5-pentenyl-alanine olefin amino acid connected by an all-carbon crosslinker comprising one double bond
  C-term NH2
LTFAAYWAQLAS

SEQ ID NO: 1273 - protein, 12 aa, Artificial Sequence
  Description of Artificial Sequence: Synthetic peptide
  N-term mdPEG7
  MOD_RES (4)..(4): Alpha-Me R8-octenyl-alanine olefin amino acid connected by an all-carbon crosslinker comprising one double bond
  misc_feature (4)..(11): Crosslink between residues
  MOD_RES (11)..(11): Alpha-Me S5-pentenyl-alanine olefin amino acid connected by an all-carbon crosslinker comprising one double bond
  C-term NH2
LTFAAYWAQLAS

SEQ ID NO: 1274 - protein, 10 aa, Artificial Sequence
  Description of Artificial Sequence: Synthetic peptide
  N-term Ac
  MOD_RES (2)..(2): Alpha-Me R8-octenyl-alanine olefin amino acid connected by an all-carbon crosslinker comprising one double bond
  misc_feature (2)..(9): Crosslink between residues
  MOD_RES (4)..(4): Pmp
  MOD_RES (5)..(5): Et6cl-Trp
  MOD_RES (9)..(9): Alpha-Me S5-pentenyl-alanine olefin amino acid connected by an all-carbon crosslinker comprising one double bond
  C-term NH2
FAAXWEALAA

SEQ ID NO: 1275 - protein, 12 aa, Artificial Sequence
  Description of Artificial Sequence: Synthetic peptide
  N-term Ac
  MOD_RES (3)..(3): 3-Chloro-Phe
  MOD_RES (4)..(4): Alpha-Me R8-octenyl-alanine olefin amino acid connected by an all-carbon crosslinker comprising one double bond
  misc_feature (4)..(11): Crosslink between residues
  MOD_RES (11)..(11): Alpha-Me S5-pentenyl-alanine olefin amino acid connected by an all-carbon crosslinker comprising one double bond
  C-term NH2
LTFAAYWAQLAS

SEQ ID NO: 1276 - protein, 12 aa, Artificial Sequence
  Description of Artificial Sequence: Synthetic peptide
  N-term Ac
  MOD_RES (3)..(3): 3-Chloro-Phe
  MOD_RES (4)..(4): Alpha-Me R8-octenyl-alanine olefin amino acid connected by an all-carbon crosslinker comprising one double bond
  misc_feature (4)..(11): Crosslink between residues
  MOD_RES (11)..(11): Alpha-Me S5-pentenyl-alanine olefin amino acid connected by an all-carbon crosslinker comprising one double bond
  C-term NH2
LTFAHYWAQLAA

SEQ ID NO: 1277 - protein, 12 aa, Artificial Sequence
  Description of Artificial Sequence: Synthetic peptide
  N-term Ac
  MOD_RES (3)..(3): 3-Chloro-Phe
  MOD_RES (4)..(4): Alpha-Me R8-octenyl-alanine olefin amino acid connected by an all-carbon crosslinker comprising one double bond
  misc_feature (4)..(11): Crosslink between residues
  MOD_RES (11)..(11): Alpha-Me S5-pentenyl-alanine olefin amino acid connected by an all-carbon crosslinker comprising one double bond
  C-term NH2
LTFAHYWWQLAS

SEQ ID NO: 1278 - protein, 12 aa, Artificial Sequence
  Description of Artificial Sequence: Synthetic peptide
  N-term Ac
  MOD_RES (3)..(3): 3-Chloro-Phe
  MOD_RES (4)..(4): Alpha-Me R8-octenyl-alanine olefin amino acid connected by an all-carbon crosslinker comprising one double bond
  misc_feature (4)..(11): Crosslink between residues
  MOD_RES (11)..(11): Alpha-Me S5-pentenyl-alanine olefin amino acid connected by an all-carbon crosslinker comprising one double bond
  C-term NH2
LTFAAYWWQLAS

SEQ ID NO: 1279 - protein, 12 aa, Artificial Sequence
  Description of Artificial Sequence: Synthetic peptide
  N-term Ac
  MOD_RES (4)..(4): Alpha-Me R8-octenyl-alanine olefin amino acid connected by an all-carbon crosslinker comprising one double bond
  misc_feature (4)..(11): Crosslink between residues
  MOD_RES (11)..(11): Alpha-Me S5-pentenyl-alanine olefin amino acid connected by an all-carbon crosslinker comprising one double bond
  C-term NH2
LTFAAYWWQLAS

SEQ ID NO: 1280 - protein, 12 aa, Artificial Sequence
  Description of Artificial Sequence: Synthetic peptide
  N-term Ac
  MOD_RES (4)..(4): Alpha-Me R8-octenyl-alanine olefin amino acid connected by an all-carbon crosslinker comprising one double bond
  misc_feature (4)..(11): Crosslink between residues
  MOD_RES (11)..(11): Alpha-Me S5-pentenyl-alanine olefin amino acid connected by an all-carbon crosslinker comprising one double bond
  C-term NH2
LTFAHYWWQLAA

SEQ ID NO: 1281 - protein, 12 aa, Artificial Sequence
  Description of Artificial Sequence: Synthetic peptide
  N-term Ac
  MOD_RES (4)..(4): Alpha-Me R8-octenyl-alanine olefin amino acid connected by an all-carbon crosslinker comprising one double bond
  misc_feature (4)..(11): Crosslink between residues
  MOD_RES (11)..(11): Alpha-Me S5-pentenyl-alanine olefin amino acid connected by an all-carbon crosslinker comprising one double bond
  C-term NH2
LTFAAYWWQLAA

SEQ ID NO: 1282 - protein, 12 aa, Artificial Sequence
  Description of Artificial Sequence: Synthetic peptide
  N-term Ac
  MOD_RES (3)..(3): Phe-4F
  MOD_RES (4)..(4): Alpha-Me R8-octenyl-alanine olefin amino acid connected by an all-carbon crosslinker comprising one double bond
  misc_feature (4)..(11): Crosslink between residues
  MOD_RES (11)..(11): Alpha-Me S5-pentenyl-alanine olefin amino acid connected by an all-carbon crosslinker comprising one double bond
  C-term NH2
LTFAAYWAQLAS

SEQ ID NO: 1283 - protein, 12 aa, Artificial Sequence
  Description of Artificial Sequence: Synthetic peptide
  N-term Ac
  MOD_RES (3)..(3): 2-Fluoro-Phe
  MOD_RES (4)..(4): Alpha-Me R8-octenyl-alanine olefin amino acid connected by an all-carbon crosslinker comprising one double bond
  misc_feature (4)..(11): Crosslink between residues
  MOD_RES (11)..(11): Alpha-Me S5-pentenyl-alanine olefin amino acid connected by an all-carbon crosslinker comprising one double bond
  C-term NH2
LTFAAYWAQLAS

SEQ ID NO: 1284 - protein, 12 aa, Artificial Sequence
  Description of Artificial Sequence: Synthetic peptide
  N-term Ac
  MOD_RES (3)..(3): 3-fluoro-Phe
  MOD_RES (4)..(4): Alpha-Me R8-octenyl-alanine olefin amino acid connected by an all-carbon crosslinker comprising one double bond
  misc_feature (4)..(11): Crosslink between residues
  MOD_RES (11)..(11): Alpha-Me S5-pentenyl-alanine olefin amino acid connected by an all-carbon crosslinker comprising one double bond
  C-term NH2
LTFAAYWAQLAS

SEQ ID NO: 1285 - protein, 12 aa, Artificial Sequence
  Description of Artificial Sequence: Synthetic peptide
  N-term Ac
  MOD_RES (3)..(3): 3,4-difluoro Phe
  MOD_RES (4)..(4): Alpha-Me R8-octenyl-alanine olefin amino acid connected by an all-carbon crosslinker comprising one double bond
  misc_feature (4)..(11): Crosslink between residues
  MOD_RES (11)..(11): Alpha-Me S5-pentenyl-alanine olefin amino acid connected by an all-carbon crosslinker comprising one double bond
  C-term NH2
LTFAAYWAQLAS

SEQ ID NO: 1286 - protein, 12 aa, Artificial Sequence
  Description of Artificial Sequence: Synthetic peptide
  N-term Ac
  MOD_RES (3)..(3): 3,5-difluoro-Phe
  MOD_RES (4)..(4): Alpha-Me R8-octenyl-alanine olefin amino acid connected by an all-carbon crosslinker comprising one double bond
  misc_feature (4)..(11): Crosslink between residues
  MOD_RES (11)..(11): Alpha-Me S5-pentenyl-alanine olefin amino acid connected by an all-carbon crosslinker comprising one double bond
  C-term NH2
LTFAAYWAQLAS

SEQ ID NO: 1287 - protein, 10 aa, Artificial Sequence
  Description of Artificial Sequence: Synthetic peptide
  N-term Ac
  MOD_RES (1)..(1): 3-Chloro-Phe
  MOD_RES (2)..(2): Alpha-Me R8-octenyl-alanine olefin amino acid connected by an all-carbon crosslinker comprising one double bond
  misc_feature (2)..(9): Crosslink between residues
  MOD_RES (9)..(9): Alpha-Me S5-pentenyl-alanine olefin amino acid connected by an all-carbon crosslinker comprising one double bond
  C-term NH2
FAAYWEALAA

SEQ ID NO: 1288 - protein, 11 aa, Artificial Sequence
  Description of Artificial Sequence: Synthetic peptide
  N-term Ac
  MOD_RES (1)..(1): 3-Chloro-Phe
  MOD_RES (2)..(2): Alpha-Me R8-octenyl-alanine olefin amino acid connected by an all-carbon crosslinker comprising one double bond
  misc_feature (2)..(9): Crosslink between residues
  MOD_RES (9)..(9): Alpha-Me S5-pentenyl-alanine olefin amino acid connected by an all-carbon crosslinker comprising one double bond
  C-term NH2
FAAYWEALAAA

SEQ ID NO: 1289 - protein, 11 aa, Artificial Sequence
  Description of Artificial Sequence: Synthetic peptide
  N-term Ac
  MOD_RES (2)..(2): Alpha-Me R8-octenyl-alanine olefin amino acid connected by an all-carbon crosslinker comprising one double bond
  misc_feature (2)..(9): Crosslink between residues
  MOD_RES (5)..(5): 6cl-Trp
  MOD_RES (9)..(9): Alpha-Me S5-pentenyl-alanine olefin amino acid connected by an all-carbon crosslinker comprising one double bond
  C-term NH2
FAAYWEALAAA

SEQ ID NO: 1290 - protein, 9 aa, Artificial Sequence
  Description of Artificial Sequence: Synthetic peptide
  N-term Ac
  MOD_RES (2)..(2): Alpha-Me R8-octenyl-alanine olefin amino acid connected by an all-carbon crosslinker comprising one double bond
  misc_feature (2)..(9): Crosslink between residues
  MOD_RES (5)..(5): 6cl-Trp
  MOD_RES (9)..(9): Alpha-Me S5-pentenyl-alanine olefin amino acid connected by an all-carbon crosslinker comprising one double bond
  C-term NH2
FAAYWEALA

SEQ ID NO: 1291 - protein, 12 aa, Artificial Sequence
  Description of Artificial Sequence: Synthetic peptide
  N-term Ac
  MOD_RES (4)..(4): Alpha-Me R8-octenyl-alanine olefin amino acid connected by an all-carbon crosslinker comprising one double bond
  MOD_RES (11)..(11): Amino acid comprising two pentenyl-alanine olefin side chains that are not crosslinked
  C-term NH2
LTFAHYWAQLAS

SEQ ID NO: 1292 - protein, 12 aa, Artificial Sequence
  Description of Artificial Sequence: Synthetic peptide
  N-term Ac
  MOD_RES (4)..(4): Alpha-Me R8-octenyl-alanine olefin amino acid connected by an all-carbon crosslinker comprising one double bond
  misc_feature (4)..(11): Crosslink between residues
  MOD_RES (11)..(11): Alpha-Me S5-pentenyl-alanine olefin amino acid connected by an all-carbon crosslinker comprising one double bond
  C-term NHsBu
LTFAHYWAQLAS

SEQ ID NO: 1293 - protein, 12 aa, Artificial Sequence
  Description of Artificial Sequence: Synthetic peptide
  N-term Ac
  MOD_RES (4)..(4): Alpha-Me R8-octenyl-alanine olefin amino acid connected by an all-carbon crosslinker comprising one double bond
  misc_feature (4)..(11): Crosslink between residues
  MOD_RES (11)..(11): Alpha-Me S5-pentenyl-alanine olefin amino acid connected by an all-carbon crosslinker comprising one double bond
  C-term NH2
STFAAYWAQLAS

SEQ ID NO: 1294 - protein, 12 aa, Artificial Sequence
  Description of Artificial Sequence: Synthetic peptide
  N-term Ac
  MOD_RES (4)..(4): Alpha-Me R8-octenyl-alanine olefin amino acid connected by an all-carbon crosslinker comprising one double bond
  misc_feature (4)..(11): Crosslink between residues
  MOD_RES (11)..(11): Alpha-Me S5-pentenyl-alanine olefin amino acid connected by an all-carbon crosslinker comprising one double bond
  C-term NH2
LTFAAYWAELAS

SEQ ID NO: 1295 - protein, 12 aa, Artificial Sequence
  Description of Artificial Sequence: Synthetic peptide
  N-term Ac
  MOD_RES (4)..(4): Alpha-Me R8-octenyl-alanine olefin amino acid connected by an all-carbon crosslinker comprising one double bond
  misc_feature (4)..(11): Crosslink between residues
  MOD_RES (11)..(11): Alpha-Me S5-pentenyl-alanine olefin amino acid connected by an all-carbon crosslinker comprising one double bond
  C-term NH2
LTFAAYWAQLAE

SEQ ID NO: 1296 - protein, 12 aa, Artificial Sequence
  Description of Artificial Sequence: Synthetic peptide
  N-term mdPEG3
  MOD_RES (4)..(4): Alpha-Me R8-octenyl-alanine olefin amino acid connected by an all-carbon crosslinker comprising one double bond
  misc_feature (4)..(11): Crosslink between residues
  MOD_RES (11)..(11): Alpha-Me S5-pentenyl-alanine olefin amino acid connected by an all-carbon crosslinker comprising one double bond
  C-term NH2
LTFAAYWAQLAS

SEQ ID NO: 1297 - protein, 12 aa, Artificial Sequence
  Description of Artificial Sequence: Synthetic peptide
  N-term Ac
  MOD_RES (4)..(4): Alpha-Me R8-octenyl-alanine olefin amino acid connected by an all-carbon crosslinker comprising one double bond
  misc_feature (4)..(11): Crosslink between residues
  MOD_RES (10)..(10): hLeu
  MOD_RES (11)..(11): Alpha-Me S5-pentenyl-alanine olefin amino acid connected by an all-carbon crosslinker comprising one double bond
  C-term NH2
LTFAAYWAQLAS

SEQ ID NO: 1298 - protein, 12 aa, Artificial Sequence
  Description of Artificial Sequence: Synthetic peptide
  N-term Ac
  MOD_RES (4)..(4): Alpha-Me R8-octenyl-alanine olefin amino acid connected by an all-carbon crosslinker comprising one double bond
  misc_feature (4)..(11): Crosslink between residues
  MOD_RES (10)..(10): Cyclohexyl-Ala
  MOD_RES (11)..(11): Alpha-Me S5-pentenyl-alanine olefin amino acid connected by an all-carbon crosslinker comprising one double bond
  C-term NH2
LTFAAYWAQAAS

SEQ ID NO: 1299 - protein, 12 aa, Artificial Sequence
  Description of Artificial Sequence: Synthetic peptide
  N-term Ac
  MOD_RES (4)..(4): Alpha-Me R8-octenyl-alanine olefin amino acid connected by an all-carbon crosslinker comprising one double bond
  misc_feature (4)..(11): Crosslink between residues
  MOD_RES (10)..(10): Cyclohexyl-Gly
  MOD_RES (11)..(11): Alpha-Me S5-pentenyl-alanine olefin amino acid connected by an all-carbon crosslinker comprising one double bond
  C-term NH2
LTFAAYWAQGAS

SEQ ID NO: 1300 - protein, 12 aa, Artificial Sequence
  Description of Artificial Sequence: Synthetic peptide
  N-term Ac
  MOD_RES (4)..(4): Alpha-Me R8-octenyl-alanine olefin amino acid connected by an all-carbon crosslinker comprising one double bond
  misc_feature (4)..(11): Crosslink between residues
  MOD_RES (10)..(10): Cyclobutyl-Ala
  MOD_RES (11)..(11): Alpha-Me S5-pentenyl-alanine olefin amino acid connected by an all-carbon crosslinker comprising one double bond
  C-term NH2
LTFAAYWAQAAS

SEQ ID NO: 1301 - protein, 12 aa, Artificial Sequence
  Description of Artificial Sequence: Synthetic peptide
  N-term Ac
  MOD_RES (4)..(4): Alpha-Me R8-octenyl-alanine olefin amino acid connected by an all-carbon crosslinker comprising one double bond
  misc_feature (4)..(11): Crosslink between residues
  MOD_RES (11)..(11): Alpha-Me S5-pentenyl-alanine olefin amino acid connected by an all-carbon crosslinker comprising one double bond
  C-term NH2
LTFAAYWAQFAS

SEQ ID NO: 1302 - protein, 12 aa, Artificial Sequence
  Description of Artificial Sequence: Synthetic peptide
  N-term Ac
  MOD_RES (3)..(3): Phe-4F
  MOD_RES (4)..(4): Alpha-Me R8-octenyl-alanine olefin amino acid connected by an all-carbon crosslinker comprising one double bond
  misc_feature (4)..(11): Crosslink between residues
  MOD_RES (10)..(10): hLeu
  MOD_RES (11)..(11): Alpha-Me S5-pentenyl-alanine olefin amino acid connected by an all-carbon crosslinker comprising one double bond
  C-term NH2
LTFAHYWAQLAS

SEQ ID NO: 1303 - protein, 12 aa, Artificial Sequence
  Description of Artificial Sequence: Synthetic peptide
  N-term Ac
  MOD_RES (3)..(3): Phe-4F
  MOD_RES (4)..(4): Alpha-Me R8-octenyl-alanine olefin amino acid connected by an all-carbon crosslinker comprising one double bond
  misc_feature (4)..(11): Crosslink between residues
  MOD_RES (10)..(10): Cyclohexyl-Ala
  MOD_RES (11)..(11): Alpha-Me S5-pentenyl-alanine olefin amino acid connected by an all-carbon crosslinker comprising one double bond
  C-term NH2
LTFAHYWAQAAS

SEQ ID NO: 1304 - protein, 12 aa, Artificial Sequence
  Description of Artificial Sequence: Synthetic peptide
  N-term Ac
  MOD_RES (3)..(3): Phe-4F
  MOD_RES (4)..(4): Alpha-Me R8-octenyl-alanine olefin amino acid connected by an all-carbon crosslinker comprising one double bond
  misc_feature (4)..(11): Crosslink between residues
  MOD_RES (10)..(10): Cyclohexyl-Gly
  MOD_RES (11)..(11): Alpha-Me S5-pentenyl-alanine olefin amino acid connected by an all-carbon crosslinker comprising one double bond
  C-term NH2
LTFAHYWAQGAS

SEQ ID NO: 1305 - protein, 12 aa, Artificial Sequence
  Description of Artificial Sequence: Synthetic peptide
  N-term Ac
  MOD_RES (3)..(3): Phe-4F
  MOD_RES (4)..(4): Alpha-Me R8-octenyl-alanine olefin amino acid connected by an all-carbon crosslinker comprising one double bond
  misc_feature (4)..(11): Crosslink between residues
  MOD_RES (10)..(10): Cyclobutyl-Ala
  MOD_RES (11)..(11): Alpha-Me S5-pentenyl-alanine olefin amino acid connected by an all-carbon crosslinker comprising one double bond
  C-term NH2
LTFAHYWAQAAS

SEQ ID NO: 1306 - protein, 12 aa, Artificial Sequence
  Description of Artificial Sequence: Synthetic peptide
  N-term Ac
  MOD_RES (3)..(3): Phe-4F
  MOD_RES (4)..(4): Alpha-Me R8-octenyl-alanine olefin amino acid connected by an all-carbon crosslinker comprising one double bond
  misc_feature (4)..(11): Crosslink between residues
  MOD_RES (10)..(10): hLeu
  MOD_RES (11)..(11): Alpha-Me S5-pentenyl-alanine olefin amino acid connected by an all-carbon crosslinker comprising one double bond
  C-term NH2
LTFAAYWAQLAS

SEQ ID NO: 1307 - protein, 12 aa, Artificial Sequence
  Description of Artificial Sequence: Synthetic peptide
  N-term Ac
  MOD_RES (3)..(3): Phe-4F
  MOD_RES (4)..(4): Alpha-Me R8-octenyl-alanine olefin amino acid connected by an all-carbon crosslinker comprising one double bond
  misc_feature (4)..(11): Crosslink between residues
  MOD_RES (10)..(10): Cyclohexyl-Ala
  MOD_RES (11)..(11): Alpha-Me S5-pentenyl-alanine olefin amino acid connected by an all-carbon crosslinker comprising one double bond
  C-term NH2
LTFAAYWAQAAS

SEQ ID NO: 1308 - protein, 12 aa, Artificial Sequence
  Description of Artificial Sequence: Synthetic peptide
  N-term Ac
  MOD_RES (3)..(3): Phe-4F
  MOD_RES (4)..(4): Alpha-Me R8-octenyl-alanine olefin amino acid connected by an all-carbon crosslinker comprising one double bond
  misc_feature (4)..(11): Crosslink between residues
  MOD_RES (10)..(10): Cyclohexyl-Gly
  MOD_RES (11)..(11): Alpha-Me S5-pentenyl-alanine olefin amino acid connected by an all-carbon crosslinker comprising one double bond
  C-term NH2
LTFAAYWAQGAS

SEQ ID NO: 1309 - protein, 12 aa, Artificial Sequence
  Description of Artificial Sequence: Synthetic peptide
  N-term Ac
  MOD_RES (3)..(3): Phe-4F
  MOD_RES (4)..(4): Alpha-Me R8-octenyl-alanine olefin amino acid connected by an all-carbon crosslinker comprising one double bond
  misc_feature (4)..(11): Crosslink between residues
  MOD_RES (10)..(10): Cyclobutyl-Ala
  MOD_RES (11)..(11): Alpha-Me S5-pentenyl-alanine olefin amino acid connected by an all-carbon crosslinker comprising one double bond
  C-term NH2
LTFAAYWAQAAS

SEQ ID NO: 1310 - protein, 12 aa, Artificial Sequence
  Description of Artificial Sequence: Synthetic peptide
  N-term Ac
  MOD_RES (3)..(3): 3-Chloro-Phe
  MOD_RES (4)..(4): Alpha-Me R8-octenyl-alanine olefin amino acid connected by an all-carbon crosslinker comprising one double bond
  misc_feature (4)..(11): Crosslink between residues
  MOD_RES (10)..(10): hLeu
  MOD_RES (11)..(11): Alpha-Me S5-pentenyl-alanine olefin amino acid connected by an all-carbon crosslinker comprising one double bond
  C-term NH2
LTFAAYWAQLAS

SEQ ID NO: 1311 - protein, 12 aa, Artificial Sequence
  Description of Artificial Sequence: Synthetic peptide
  N-term Ac
  MOD_RES (3)..(3): 3-Chloro-Phe
  MOD_RES (4)..(4): Alpha-Me R8-octenyl-alanine olefin amino acid connected by an all-carbon crosslinker comprising one double bond
  misc_feature (4)..(11): Crosslink between residues
  MOD_RES (10)..(10): Cyclohexyl-Ala
  MOD_RES (11)..(11): Alpha-Me S5-pentenyl-alanine olefin amino acid connected by an all-carbon crosslinker comprising one double bond
  C-term NH2
LTFAAYWAQAAS

SEQ ID NO: 1312 - protein, 12 aa, Artificial Sequence
  Description of Artificial Sequence: Synthetic peptide
  N-term Ac
  MOD_RES (3)..(3): 3-Chloro-Phe
  MOD_RES (4)..(4): Alpha-Me R8-octenyl-alanine olefin amino acid connected by an all-carbon crosslinker comprising one double bond
  misc_feature (4)..(11): Crosslink between residues
  MOD_RES (10)..(10): Cyclohexyl-Gly
  MOD_RES (11)..(11): Alpha-Me S5-pentenyl-alanine olefin amino acid connected by an all-carbon crosslinker comprising one double bond
  C-term NH2
LTFAAYWAQGAS

SEQ ID NO: 1313 - protein, 12 aa, Artificial Sequence
  Description of Artificial Sequence: Synthetic peptide
  N-term Ac
  MOD_RES (3)..(3): 3-Chloro-Phe
  MOD_RES (4)..(4): Alpha-Me R8-octenyl-alanine olefin amino acid connected by an all-carbon crosslinker comprising one double bond
  misc_feature (4)..(11): Crosslink between residues
  MOD_RES (10)..(10): Cyclobutyl-Ala
  MOD_RES (11)..(11): Alpha-Me S5-pentenyl-alanine olefin amino acid connected by an all-carbon crosslinker comprising one double bond
  C-term NH2
LTFAAYWAQAAS

SEQ ID NO: 1314 - protein, 12 aa, Artificial Sequence
  Description of Artificial Sequence: Synthetic peptide
  N-term Ac
  MOD_RES (4)..(4): Alpha-Me R8-octenyl-alanine olefin amino acid connected by an all-carbon crosslinker comprising one double bond
  misc_feature (4)..(11): Crosslink between residues
  MOD_RES (10)..(10): homo-Phe
  MOD_RES (11)..(11): Alpha-Me S5-pentenyl-alanine olefin amino acid connected by an all-carbon crosslinker comprising one double bond
  C-term NH2
LTFAAYWAQFAS

SEQ ID NO: 1315 - protein, 12 aa, Artificial Sequence
  Description of Artificial Sequence: Synthetic peptide
  N-term Ac
  MOD_RES (4)..(4): Alpha-Me R8-octenyl-alanine olefin amino acid connected by an all-carbon crosslinker comprising one double bond
  misc_feature (4)..(11): Crosslink between residues
  MOD_RES (10)..(10): Phe-3CF3
  MOD_RES (11)..(11): Alpha-Me S5-pentenyl-alanine olefin amino acid connected by an all-carbon crosslinker comprising one double bond
  C-term NH2
LTFAAYWAQFAS

SEQ ID NO: 1316 - protein, 12 aa, Artificial Sequence
  Description of Artificial Sequence: Synthetic peptide
  N-term Ac
  MOD_RES (4)..(4): Alpha-Me R8-octenyl-alanine olefin amino acid connected by an all-carbon crosslinker comprising one double bond
  misc_feature (4)..(11): Crosslink between residues
  MOD_RES (10)..(10): Phe-3Me
  MOD_RES (11)..(11): Alpha-Me S5-pentenyl-alanine olefin amino acid connected by an all-carbon crosslinker comprising one double bond
  C-term NH2
LTFAAYWAQFAS

SEQ ID NO: 1317 - protein, 12 aa, Artificial Sequence
  Description of Artificial Sequence: Synthetic peptide
  N-term Ac
  MOD_RES (4)..(4): Alpha-Me R8-octenyl-alanine olefin amino acid connected by an all-carbon crosslinker comprising one double bond
  misc_feature (4)..(11): Crosslink between residues
  MOD_RES (10)..(10): 1-Naphthalanine
  MOD_RES (11)..(11): Alpha-Me S5-pentenyl-alanine olefin amino acid connected by an all-carbon crosslinker comprising one double bond
  C-term NH2
LTFAAYWAQAAS

SEQ ID NO: 1318 - protein, 12 aa, Artificial Sequence
  Description of Artificial Sequence: Synthetic peptide
  N-term Ac
  MOD_RES (4)..(4): Alpha-Me R8-octenyl-alanine olefin amino acid connected by an all-carbon crosslinker comprising one double bond
  misc_feature (4)..(11): Crosslink between residues
  MOD_RES (10)..(10): Bi-Phe
  MOD_RES (11)..(11): Alpha-Me S5-pentenyl-alanine olefin amino acid connected by an all-carbon crosslinker comprising one double bond
  C-term NH2
LTFAAYWAQFAS

SEQ ID NO: 1319 - protein, 12 aa, Artificial Sequence
  Description of Artificial Sequence: Synthetic peptide
  N-term Ac
  MOD_RES (4)..(4): Alpha-Me R8-octenyl-alanine olefin amino acid connected by an all-carbon crosslinker comprising one double bond
  misc_feature (4)..(11): Crosslink between residues
  MOD_RES (11)..(11): Alpha-Me S5-pentenyl-alanine olefin amino acid connected by an all-carbon crosslinker comprising one double bond
  C-term NH2
LTFAFYWAQLAA

SEQ ID NO: 1320 - protein, 12 aa, Artificial Sequence
  Description of Artificial Sequence: Synthetic peptide
  N-term Ac
  MOD_RES (4)..(4): Alpha-Me R8-octenyl-alanine olefin amino acid connected by an all-carbon crosslinker comprising one double bond
  misc_feature (4)..(11): Crosslink between residues
  MOD_RES (11)..(11): Alpha-Me S5-pentenyl-alanine olefin amino acid connected by an all-carbon crosslinker comprising one double bond
  C-term NHAm
LTFAHYWAQLAS

SEQ ID NO: 1321 - protein, 12 aa, Artificial Sequence
  Description of Artificial Sequence: Synthetic peptide
  N-term Ac
  MOD_RES (4)..(4): Alpha-Me R8-octenyl-alanine olefin amino acid connected by an all-carbon crosslinker comprising one double bond
  misc_feature (4)..(11): Crosslink between residues
  MOD_RES (11)..(11): Alpha-Me S5-pentenyl-alanine olefin amino acid connected by an all-carbon crosslinker comprising one double bond
  C-term NHiAm
LTFAHYWAQLAS

SEQ ID NO: 1322 - protein, 12 aa, Artificial Sequence
  Description of Artificial Sequence: Synthetic peptide
  N-term Ac
  MOD_RES (4)..(4): Alpha-Me R8-octenyl-alanine olefin amino acid connected by an all-carbon crosslinker comprising one double bond
  misc_feature (4)..(11): Crosslink between residues
  MOD_RES (11)..(11): Alpha-Me S5-pentenyl-alanine olefin amino acid connected by an all-carbon crosslinker comprising one double bond
  C-term NHnPr3Ph
LTFAHYWAQLAS

SEQ ID NO: 1323 - protein, 12 aa, Artificial Sequence
  Description of Artificial Sequence: Synthetic peptide
  N-term Ac
  MOD_RES (4)..(4): Alpha-Me R8-octenyl-alanine olefin amino acid connected by an all-carbon crosslinker comprising one double bond
  misc_feature (4)..(11): Crosslink between residues
  MOD_RES (11)..(11): Alpha-Me S5-pentenyl-alanine olefin amino acid connected by an all-carbon crosslinker comprising one double bond
  C-term NHnBu3,3Me
LTFAHYWAQLAS

SEQ ID NO: 1324 - protein, 12 aa, Artificial Sequence
  Description of Artificial Sequence: Synthetic peptide
  N-term Ac
  MOD_RES (4)..(4): Alpha-Me R8-octenyl-alanine olefin amino acid connected by an all-carbon crosslinker comprising one double bond
  misc_feature (4)..(11): Crosslink between residues
  MOD_RES (11)..(11): Alpha-Me S5-pentenyl-alanine olefin amino acid connected by an all-carbon crosslinker comprising one double bond
  C-term NHnPr
LTFAHYWAQLAS

SEQ ID NO: 1325 - protein, 12 aa, Artificial Sequence
  Description of Artificial Sequence: Synthetic peptide
  N-term Ac
  MOD_RES (4)..(4): Alpha-Me R8-octenyl-alanine olefin amino acid connected by an all-carbon crosslinker comprising one double bond
  misc_feature (4)..(11): Crosslink between residues
  MOD_RES (11)..(11): Alpha-Me S5-pentenyl-alanine olefin amino acid connected by an all-carbon crosslinker comprising one double bond
  C-term NHnEt2Ch
LTFAHYWAQLAS

SEQ ID NO: 1326 - protein, 12 aa, Artificial Sequence
  Description of Artificial Sequence: Synthetic peptide
  N-term Ac
  MOD_RES (4)..(4): Alpha-Me R8-octenyl-alanine olefin amino acid connected by an all-carbon crosslinker comprising one double bond
  misc_feature (4)..(11): Crosslink between residues
  MOD_RES (11)..(11): Alpha-Me S5-pentenyl-alanine olefin amino acid connected by an all-carbon crosslinker comprising one double bond
  C-term NHHex
LTFAHYWAQLAS

SEQ ID NO: 1327 - protein, 12 aa, Artificial Sequence
  Description of Artificial Sequence: Synthetic peptide
  N-term Ac
  MOD_RES (4)..(4): Alpha-Me R8-octenyl-alanine olefin amino acid connected by an all-carbon crosslinker comprising one double bond
  misc_feature (4)..(11): Crosslink between residues
  MOD_RES (11)..(11): Alpha-Me S5-pentenyl-alanine olefin amino acid connected by an all-carbon crosslinker comprising one double bond
  C-term NHmdPeg2
LTFAAYWAQLAS

SEQ ID NO: 1328 - protein, 12 aa, Artificial Sequence
  Description of Artificial Sequence: Synthetic peptide
  N-term Ac
  MOD_RES (4)..(4): Alpha-Me R8-octenyl-alanine olefin amino acid connected by an all-carbon crosslinker comprising one double bond
  misc_feature (4)..(11): Crosslink between residues
  MOD_RES (11)..(11): Alpha-Me S5-pentenyl-alanine olefin amino acid connected by an all-carbon crosslinker comprising one double bond
  C-term NHmdPeg2
LTFAAYWAQLAA

SEQ ID NO: 1329 - protein, 12 aa, Artificial Sequence
  Description of Artificial Sequence: Synthetic peptide
  N-term Ac
  MOD_RES (4)..(4): Alpha-Me R8-octenyl-alanine olefin amino acid connected by an all-carbon crosslinker comprising one double bond
  misc_feature (4)..(11): Crosslink between residues
  MOD_RES (11)..(11): Alpha-Me S5-pentenyl-alanine olefin amino acid connected by an all-carbon crosslinker comprising one double bond
  C-term NHmdPeg4
LTFAAYWAQLAA

SEQ ID NO: 1330 - protein, 10 aa, Artificial Sequence
  Description of Artificial Sequence: Synthetic peptide
  N-term Ac
  MOD_RES (2)..(2): Alpha-Me R8-octenyl-alanine olefin amino acid connected by an all-carbon crosslinker comprising one double bond
  misc_feature (2)..(9): Crosslink between residues
  MOD_RES (5)..(5): dl4m-Trp
  MOD_RES (9)..(9): Alpha-Me S5-pentenyl-alanine olefin amino acid connected by an all-carbon crosslinker comprising one double bond
  C-term NH2
FAAYWEALAA

SEQ ID NO: 1331 - protein, 10 aa, Artificial Sequence
  Description of Artificial Sequence: Synthetic peptide
  N-term Ac
  MOD_RES (2)..(2): Alpha-Me R8-octenyl-alanine olefin amino acid connected by an all-carbon crosslinker comprising one double bond
  misc_feature (2)..(9): Crosslink between residues
  MOD_RES (5)..(5): dl5cl-Trp
  MOD_RES (9)..(9): Alpha-Me S5-pentenyl-alanine olefin amino acid connected by an all-carbon crosslinker comprising one double bond
  C-term NH2
FAAYWEALAA

SEQ ID NO: 1332 - protein, 12 aa, Artificial Sequence
  Description of Artificial Sequence: Synthetic peptide
  N-term Ac
  MOD_RES (3)..(3): homo-Phe
  MOD_RES (4)..(4): Alpha-Me R8-octenyl-alanine olefin amino acid connected by an all-carbon crosslinker comprising one double bond
  misc_feature (4)..(11): Crosslink between residues
  MOD_RES (11)..(11): Alpha-Me S5-pentenyl-alanine olefin amino acid connected by an all-carbon crosslinker comprising one double bond
  C-term NH2
LTFAAYWAQLAS

SEQ ID NO: 1333 - protein, 12 aa, Artificial Sequence
  Description of Artificial Sequence: Synthetic peptide
  N-term Ac
  MOD_RES (3)..(3): 2-Naphthalanine
  MOD_RES (4)..(4): Alpha-Me R8-octenyl-alanine olefin amino acid connected by an all-carbon crosslinker comprising one double bond
  misc_feature (4)..(11): Crosslink between residues
  MOD_RES (11)..(11): Alpha-Me S5-pentenyl-alanine olefin amino acid connected by an all-carbon crosslinker comprising one double bond
  C-term NH2
LTAAAYWAQLAS

SEQ ID NO: 1334 - protein, 12 aa, Artificial Sequence
  Description of Artificial Sequence: Synthetic peptide
  N-term Ac
  MOD_RES (4)..(4): Alpha-Me R8-octenyl-alanine olefin amino acid connected by an all-carbon crosslinker comprising one double bond
  misc_feature (4)..(11): Crosslink between residues
  MOD_RES (11)..(11): Alpha-Me S5-pentenyl-alanine olefin amino acid connected by an all-carbon crosslinker comprising one double bond
  C-term NH2
LTAAAYWAQLAS

SEQ ID NO: 1335 - protein, 12 aa, Artificial Sequence
  Description of Artificial Sequence: Synthetic peptide
  N-term Ac
  MOD_RES (4)..(4): Alpha-Me R8-octenyl-alanine olefin amino acid connected by an all-carbon crosslinker comprising one double bond
  misc_feature (4)..(11): Crosslink between residues
  MOD_RES (11)..(11): Alpha-Me S5-pentenyl-alanine olefin amino acid connected by an all-carbon crosslinker comprising one double bond
  C-term NH2
LTFAAYWVQLAS

SEQ ID NO: 1336 - protein, 12 aa, Artificial Sequence
  Description of Artificial Sequence: Synthetic peptide
  N-term Ac
  MOD_RES (4)..(4): Alpha-Me R8-octenyl-alanine olefin amino acid connected by an all-carbon crosslinker comprising one double bond
  misc_feature (4)..(11): Crosslink between residues
  MOD_RES (11)..(11): Alpha-Me S5-pentenyl-alanine olefin amino acid connected by an all-carbon crosslinker comprising one double bond
  C-term NH2
LTFAHYWAALAA

SEQ ID NO: 1337 - protein, 12 aa, Artificial Sequence
  Description of Artificial Sequence: Synthetic peptide
  N-term Ac
  MOD_RES (4)..(4): Alpha-Me R8-octenyl-alanine olefin amino acid connected by an all-carbon crosslinker comprising one double bond
  misc_feature (4)..(11): Crosslink between residues
  MOD_RES (11)..(11): Alpha-Me S5-pentenyl-alanine olefin amino acid connected by an all-carbon crosslinker comprising one double bond
  C-term NH2
LTFAVYWAQLAA

SEQ ID NO: 1338 - protein, 12 aa, Artificial Sequence
  Description of Artificial Sequence: Synthetic peptide
  N-term Ac
  MOD_RES (4)..(4): Alpha-Me R8-octenyl-alanine olefin amino acid connected by an all-carbon crosslinker comprising one double bond
  misc_feature (4)..(11): Crosslink between residues
  MOD_RES (11)..(11): Alpha-Me S5-pentenyl-alanine olefin amino acid connected by an all-carbon crosslinker comprising one double bond
  C-term NH2
LTFAIYWAQLAS

SEQ ID NO: 1339 - protein, 12 aa, Artificial Sequence
  Description of Artificial Sequence: Synthetic peptide
  N-term Ac
  MOD_RES (4)..(4): Alpha-Me R8-octenyl-alanine olefin amino acid connected by an all-carbon crosslinker comprising one double bond
  misc_feature (4)..(11): Crosslink between residues
  MOD_RES (11)..(11): Alpha-Me S5-pentenyl-alanine olefin amino acid connected by an all-carbon crosslinker comprising one double bond
  C-term NH2
FTFAVYWSQLAS

SEQ ID NO: 1340 - protein, 12 aa, Artificial Sequence
  Description of Artificial Sequence: Synthetic peptide
  N-term Ac
  MOD_RES (4)..(4): Alpha-Me R8-octenyl-alanine olefin amino acid connected by an all-carbon crosslinker comprising one double bond
  misc_feature (4)..(11): Crosslink between residues
  MOD_RES (11)..(11): Alpha-Me S5-pentenyl-alanine olefin amino acid connected by an all-carbon crosslinker comprising one double bond
  C-term NH2
ITFAFYWAQLAS

SEQ ID NO: 1341 - protein, 12 aa, Artificial Sequence
  Description of Artificial Sequence: Synthetic peptide
  N-term Ac
  MOD_RES (1)..(1): 2-Naphthalanine
  MOD_RES (4)..(4): Alpha-Me R8-octenyl-alanine olefin amino acid connected by an all-carbon crosslinker comprising one double bond
  misc_feature (4)..(11): Crosslink between residues
  MOD_RES (11)..(11): Alpha-Me S5-pentenyl-alanine olefin amino acid connected by an all-carbon crosslinker comprising one double bond
  C-term NH2
ATFAVYWSQLAS

SEQ ID NO: 1342 - protein, 12 aa, Artificial Sequence
  Description of Artificial Sequence: Synthetic peptide
  N-term Ac
  MOD_RES (4)..(4): Alpha-Me R8-octenyl-alanine olefin amino acid connected by an all-carbon crosslinker comprising one double bond
  misc_feature (4)..(11): Crosslink between residues
  MOD_RES (11)..(11): Alpha-Me S5-pentenyl-alanine olefin amino acid connected by an all-carbon crosslinker comprising one double bond
  C-term NH2
ITFALYWSQLAS

SEQ ID NO: 1343 - protein, 12 aa, Artificial Sequence
  Description of Artificial Sequence: Synthetic peptide
  N-term Ac
  MOD_RES (4)..(4): Alpha-Me R8-octenyl-alanine olefin amino acid connected by an all-carbon crosslinker comprising one double bond
  misc_feature (4)..(11): Crosslink between residues
  MOD_RES (11)..(11): Alpha-Me S5-pentenyl-alanine olefin amino acid connected by an all-carbon crosslinker comprising one double bond
  C-term NH2
FTFAFYWAQLAS

SEQ ID NO: 1344 - protein, 12 aa, Artificial Sequence
  Description of Artificial Sequence: Synthetic peptide
  N-term Ac
  MOD_RES (4)..(4): Alpha-Me R8-octenyl-alanine olefin amino acid connected by an all-carbon crosslinker comprising one double bond
  misc_feature (4)..(11): Crosslink between residues
  MOD_RES (11)..(11): Alpha-Me S5-pentenyl-alanine olefin amino acid connected by an all-carbon crosslinker comprising one double bond
  C-term NH2
WTFAVYWAQLAS

SEQ ID NO: 1345 - protein, 12 aa, Artificial Sequence
  Description of Artificial Sequence: Synthetic peptide
  N-term Ac
  MOD_RES (4)..(4): Alpha-Me R8-octenyl-alanine olefin amino acid connected by an all-carbon crosslinker comprising one double bond
  misc_feature (4)..(11): Crosslink between residues
  MOD_RES (11)..(11): Alpha-Me S5-pentenyl-alanine olefin amino acid connected by an all-carbon crosslinker comprising one double bond
  C-term NH2
WTFAWYWAQLAS

SEQ ID NO: 1346 - protein, 12 aa, Artificial Sequence
  Description of Artificial Sequence: Synthetic peptide
  N-term Ac
  MOD_RES (4)..(4): Alpha-Me R8-octenyl-alanine olefin amino acid connected by an all-carbon crosslinker comprising one double bond
  misc_feature (4)..(11): Crosslink between residues
  MOD_RES (11)..(11): Alpha-Me S5-pentenyl-alanine olefin amino acid connected by an all-carbon crosslinker comprising one double bond
  C-term NH2
VTFAAYWSQLAS

SEQ ID NO: 1347 - protein, 12 aa, Artificial Sequence
  Description of Artificial Sequence: Synthetic peptide
  N-term Ac
  MOD_RES (4)..(4): Alpha-Me R8-octenyl-alanine olefin amino acid connected by an all-carbon crosslinker comprising one double bond
  misc_feature (4)..(11): Crosslink between residues
  MOD_RES (11)..(11): Alpha-Me S5-pentenyl-alanine olefin amino acid connected by an all-carbon crosslinker comprising one double bond
  C-term NH2
WTFAFYWSQLAS

SEQ ID NO: 1348 - protein, 12 aa, Artificial Sequence
  Description of Artificial Sequence: Synthetic peptide
  N-term Ac
  MOD_RES (4)..(4): Alpha-Me R8-octenyl-alanine olefin amino acid connected by an all-carbon crosslinker comprising one double bond
  misc_feature (4)..(11): Crosslink between residues
  MOD_RES (11)..(11): Alpha-Me S5-pentenyl-alanine olefin amino acid connected by an all-carbon crosslinker comprising one double bond
  C-term NH2
FTFAIYWAQLAS

SEQ ID NO: 1349 - protein, 12 aa, Artificial Sequence
  Description of Artificial Sequence: Synthetic peptide
  N-term Ac
  MOD_RES (4)..(4): Alpha-Me R8-octenyl-alanine olefin amino acid connected by an all-carbon crosslinker comprising one double bond
  misc_feature (4)..(11): Crosslink between residues
  MOD_RES (11)..(11): Alpha-Me S5-pentenyl-alanine olefin amino acid connected by an all-carbon crosslinker comprising one double bond
  C-term NH2
WTFAVYWSQLAS

SEQ ID NO: 1350 - protein, 12 aa, Artificial Sequence
  Description of Artificial Sequence: Synthetic peptide
  N-term Ac
  MOD_RES (4)..(4): Alpha-Me R8-octenyl-alanine olefin amino acid connected by an all-carbon crosslinker comprising one double bond
  misc_feature (4)..(11): Crosslink between residues
  MOD_RES (11)..(11): Alpha-Me S5-pentenyl-alanine olefin amino acid connected by an all-carbon crosslinker comprising one double bond
  C-term NH2
FTFALYWSQLAS

SEQ ID NO: 1351 - protein, 12 aa, Artificial Sequence
  Description of Artificial Sequence: Synthetic peptide
  N-term Ac
  MOD_RES (4)..(4): Alpha-Me R8-octenyl-alanine olefin amino acid connected by an all-carbon crosslinker comprising one double bond
  misc_feature (4)..(11): Crosslink between residues
  MOD_RES (11)..(11): Alpha-Me S5-pentenyl-alanine olefin amino acid connected by an all-carbon crosslinker comprising one double bond
  C-term NH2
YTFAFYWSQLAS

SEQ ID NO: 1352 - protein, 12 aa, Artificial Sequence
  Description of Artificial Sequence: Synthetic peptide
  N-term Ac
  MOD_RES (4)..(4): Alpha-Me R8-octenyl-alanine olefin amino acid connected by an all-carbon crosslinker comprising one double bond
  misc_feature (4)..(11): Crosslink between residues
  MOD_RES (7)..(7): 6cl-Trp
  MOD_RES (11)..(11): Alpha-Me S5-pentenyl-alanine olefin amino acid connected by an all-carbon crosslinker comprising one double bond
  C-term NH2
LTFAAYWEALAA

SEQ ID NO: 1353 - protein, 12 aa, Artificial Sequence
  Description of Artificial Sequence: Synthetic peptide
  N-term Ac
  MOD_RES (4)..(4): Alpha-Me R8-octenyl-alanine olefin amino acid connected by an all-carbon crosslinker comprising one double bond
  misc_feature (4)..(11): Crosslink between residues
  MOD_RES (7)..(7): 6cl-Trp
  MOD_RES (11)..(11): Alpha-Me S5-pentenyl-alanine olefin amino acid connected by an all-carbon crosslinker comprising one double bond
  C-term NH2
LTFAAYWSQLAS

SEQ ID NO: 1354 - protein, 10 aa, Artificial Sequence
  Description of Artificial Sequence: Synthetic peptide
  N-term Ac
  MOD_RES (2)..(2): Alpha-Me R8-octenyl-alanine olefin amino acid connected by an all-carbon crosslinker comprising one double bond
  misc_feature (2)..(9): Crosslink between residues
  MOD_RES (5)..(5): 6cl-Trp
  MOD_RES (9)..(9): Alpha-Me S5-pentenyl-alanine olefin amino acid connected by an all-carbon crosslinker comprising one double bond
  C-term NH2
FAAYWSALAA

SEQ ID NO: 1355 - protein, 11 aa, Artificial Sequence
  Description of Artificial Sequence: Synthetic peptide
  N-term Ac
  MOD_RES (2)..(2): Alpha-Me R8-octenyl-alanine olefin amino acid connected by an all-carbon crosslinker comprising one double bond
  misc_feature (2)..(9): Crosslink between residues
  MOD_RES (5)..(5): 6cl-Trp
  MOD_RES (9)..(9): Alpha-Me S5-pentenyl-alanine olefin amino acid connected by an all-carbon crosslinker comprising one double bond
  C-term NH2
FAAYWQALAAA

SEQ ID NO: 1356 - protein, 12 aa, Artificial Sequence
  Description of Artificial Sequence: Synthetic peptide
  N-term Ac
  MOD_RES (4)..(4): Alpha-Me R8-octenyl-alanine olefin amino acid connected by an all-carbon crosslinker comprising one double bond
  misc_feature (4)..(11): Crosslink between residues
  MOD_RES (11)..(11): Alpha-Me S5-pentenyl-alanine olefin amino acid connected by an all-carbon crosslinker comprising one double bond
  C-term NH2
LHFAAYWAQLAS

SEQ ID NO: 1357 - protein, 12 aa, Artificial Sequence
  Description of Artificial Sequence: Synthetic peptide
  N-term Ac
  MOD_RES (4)..(4): Alpha-Me R8-octenyl-alanine olefin amino acid connected by an all-carbon crosslinker comprising one double bond
  misc_feature (4)..(11): Crosslink between residues
  MOD_RES (11)..(11): Alpha-Me S5-pentenyl-alanine olefin amino acid connected by an all-carbon crosslinker comprising one double bond
  C-term NH2
LTFAAYWAQLAS

SEQ ID NO: 1358 - protein, 12 aa, Artificial Sequence
  Description of Artificial Sequence: Synthetic peptide
  N-term Ac
  MOD_RES (4)..(4): Alpha-Me R8-octenyl-alanine olefin amino acid connected by an all-carbon crosslinker comprising one double bond
  misc_feature (4)..(11): Crosslink between residues
  MOD_RES (11)..(11): Alpha-Me S5-pentenyl-alanine olefin amino acid connected by an all-carbon crosslinker comprising one double bond
  C-term NH2
LTFAAHWAQLAS

SEQ ID NO: 1359 - protein, 12 aa, Artificial Sequence
  Description of Artificial Sequence: Synthetic peptide
  N-term Ac
  MOD_RES (4)..(4): Alpha-Me R8-octenyl-alanine olefin amino acid connected by an all-carbon crosslinker comprising one double bond
  misc_feature (4)..(11): Crosslink between residues
  MOD_RES (11)..(11): Alpha-Me S5-pentenyl-alanine olefin amino acid connected by an all-carbon crosslinker comprising one double bond
  C-term NH2
LTFAAYWAHLAS

SEQ ID NO: 1360 - protein, 12 aa, Artificial Sequence
  Description of Artificial Sequence: Synthetic peptide
  N-term Ac
  MOD_RES (4)..(4): Alpha-Me R8-octenyl-alanine olefin amino acid connected by an all-carbon crosslinker comprising one double bond
  misc_feature (4)..(11): Crosslink between residues
  MOD_RES (11)..(11): Alpha-Me S5-pentenyl-alanine olefin amino acid connected by an all-carbon crosslinker comprising one double bond
  C-term NH2
LTFAAYWAQLAH

SEQ ID NO: 1361 - protein, 13 aa, Artificial Sequence
  Description of Artificial Sequence: Synthetic peptide
  MOD_RES (5)..(5): Alpha-Me R8-octenyl-alanine olefin amino acid connected by an all-carbon crosslinker comprising one double bond
  misc_feature (5)..(12): Crosslink between residues
  MOD_RES (12)..(12): Alpha-Me S5-pentenyl-alanine olefin amino acid connected by an all-carbon crosslinker comprising one double bond
  C-term NH2
HLTFAAYWAQLAA

SEQ ID NO: 1362 - protein, 12 aa, Artificial Sequence
  Description of Artificial Sequence: Synthetic peptide
  N-term Ac
  MOD_RES (4)..(4): Alpha-Me R8-octenyl-alanine olefin amino acid connected by an all-carbon crosslinker comprising one double bond
  misc_feature (4)..(11): Crosslink between residues
  MOD_RES (11)..(11): Alpha-Me S5-pentenyl-alanine olefin amino acid connected by an all-carbon crosslinker comprising one double bond
  C-term NH2
HHFAAYWAQLAS

SEQ ID NO: 1363 - protein, 14 aa, Artificial Sequence
  Description of Artificial Sequence: Synthetic peptide
  N-term Ac
  MOD_RES (1)..(1): D-amino acid
  MOD_RES (2)..(2): 2-aminoisobutyric acid
  MOD_RES (6)..(6): Alpha-Me R8-octenyl-alanine olefin amino acid connected by an all-carbon crosslinker comprising one double bond
  misc_feature (6)..(13): Crosslink between residues
  MOD_RES (13)..(13): Alpha-Me S5-pentenyl-alanine olefin amino acid connected by an all-carbon crosslinker comprising one double bond
  C-term NH2
AXWTFAVYWSQLAS

SEQ ID NO: 1364 - protein, 13 aa, Artificial Sequence
  Description of Artificial Sequence: Synthetic peptide
  N-term Ac
  MOD_RES (1)..(1): 2-aminoisobutyric acid
  MOD_RES (5)..(5): Alpha-Me R8-octenyl-alanine olefin amino acid connected by an all-carbon crosslinker comprising one double bond
  misc_feature (5)..(12): Crosslink between residues
  MOD_RES (12)..(12): Alpha-Me S5-pentenyl-alanine olefin amino acid connected by an all-carbon crosslinker comprising one double bond
  C-term NH2
XWTFAHYWAQLAS

SEQ ID NO: 1365 - protein, 14 aa, Artificial Sequence
  Description of Artificial Sequence: Synthetic peptide
  N-term Ac
  MOD_RES (1)..(1): 2-aminoisobutyric acid
  MOD_RES (6)..(6): Alpha-Me R8-octenyl-alanine olefin amino acid connected by an all-carbon crosslinker comprising one double bond
  misc_feature (6)..(13): Crosslink between residues
  MOD_RES (13)..(13): Alpha-Me S5-pentenyl-alanine olefin amino acid connected by an all-carbon crosslinker comprising one double bond
  C-term NH2
XAWTFAHYWAQLAS

SEQ ID NO: 1366 - protein, 13 aa, Artificial Sequence
  Description of Artificial Sequence: Synthetic peptide
  N-term Ac
  MOD_RES (1)..(1): D-amino acid
  MOD_RES (5)..(5): Alpha-Me R8-octenyl-alanine olefin amino acid connected by an all-carbon crosslinker comprising one double bond
  misc_feature (5)..(12): Crosslink between residues
  MOD_RES (12)..(12): Alpha-Me S5-pentenyl-alanine olefin amino acid connected by an all-carbon crosslinker comprising one double bond
  C-term NH2
FWTFAHYWAQLAS

SEQ ID NO: 1367 - protein, 14 aa, Artificial Sequence
  Description of Artificial Sequence: Synthetic peptide
  N-term Ac
  MOD_RES (1)..(1): 2-aminoisobutyric acid
  MOD_RES (6)..(6): Alpha-Me R8-octenyl-alanine olefin amino acid connected by an all-carbon crosslinker comprising one double bond
  misc_feature (6)..(13): Crosslink between residues
  MOD_RES (13)..(13): Alpha-Me S5-pentenyl-alanine olefin amino acid connected by an all-carbon crosslinker comprising one double bond
  C-term NH2
XWWTFAHYWAQLAS

SEQ ID NO: 1368 - protein, 12 aa, Artificial Sequence
  Description of Artificial Sequence: Synthetic peptide
  N-term Ac
  MOD_RES (4)..(4): Alpha-Me R8-octenyl-alanine olefin amino acid connected by an all-carbon crosslinker comprising one double bond
  misc_feature (4)..(11): Crosslink between residues
  MOD_RES (11)..(11): Alpha-Me S5-pentenyl-alanine olefin amino acid connected by an all-carbon crosslinker comprising one double bond
  C-term NH2
WTFALYWSQLAS

SEQ ID NO: 1369 - protein, 12 aa, Artificial Sequence
  Description of Artificial Sequence: Synthetic peptide
  N-term Ac
  MOD_RES (4)..(4): Alpha-Me R8-octenyl-alanine olefin amino acid connected by an all-carbon crosslinker comprising one double bond
  misc_feature (4)..(11): Crosslink between residues
  MOD_RES (5)..(5): Norleucine
  MOD_RES (11)..(11): Alpha-Me S5-pentenyl-alanine olefin amino acid connected by an all-carbon crosslinker comprising one double bond
  C-term NH2
WTFALYWSQLAS

SEQ ID NO: 1370 - protein, 12 aa, Artificial Sequence
  Description of Artificial Sequence: Synthetic peptide
  N-term Ac
  MOD_RES (4)..(4): Alpha-Me R8-octenyl-alanine olefin amino acid connected by an all-carbon crosslinker comprising one double bond
  misc_feature (4)..(11): Crosslink between residues
  MOD_RES (11)..(11): Alpha-Me S5-pentenyl-alanine olefin amino acid connected by an all-carbon crosslinker comprising one double bond
  MOD_RES (12)..(12): D-amino acid
  C-term NH2
LTFAAYWSQLAA

SEQ ID NO: 1371 - protein, 12 aa, Artificial Sequence
  Description of Artificial Sequence: Synthetic peptide
  N-term Ac
  MOD_RES (4)..(4): Alpha-Me R8-octenyl-alanine olefin amino acid connected by an all-carbon crosslinker comprising one double bond
  misc_feature (4)..(11): Crosslink between residues
  MOD_RES (11)..(11): Alpha-Me S5-pentenyl-alanine olefin amino acid connected by an all-carbon crosslinker comprising one double bond
  C-term NH2
LTFAEYWARLAA

SEQ ID NO: 1372 - protein, 12 aa, Artificial Sequence
  Description of Artificial Sequence: Synthetic peptide
  N-term Ac
  MOD_RES (4)..(4): Alpha-Me R8-octenyl-alanine olefin amino acid connected by an all-carbon crosslinker comprising one double bond
  misc_feature (4)..(11): Crosslink between residues
  MOD_RES (11)..(11): Alpha-Me S5-pentenyl-alanine olefin amino acid connected by an all-carbon crosslinker comprising one double bond
  C-term NH2
LTFAEYWAHLAA

SEQ ID NO: 1373 - protein, 12 aa, Artificial Sequence
  Description of Artificial Sequence: Synthetic peptide
  N-term Ac
  MOD_RES (1)..(1): D-amino acid
  MOD_RES (4)..(4): Alpha-Me R8-octenyl-alanine olefin amino acid connected by an all-carbon crosslinker comprising one double bond
  misc_feature (4)..(11): Crosslink between residues
  MOD_RES (11)..(11): Alpha-Me S5-pentenyl-alanine olefin amino acid connected by an all-carbon crosslinker comprising one double bond
  C-term NH2
ATFAAYWAQLAS

SEQ ID NO: 1374 - protein, 12 aa, Artificial Sequence
  Description of Artificial Sequence: Synthetic peptide
  N-term Ac
  MOD_RES (1)..(1): 2-aminoisobutyric acid
  MOD_RES (4)..(4): Alpha-Me R8-octenyl-alanine olefin amino acid connected by an all-carbon crosslinker comprising one double bond
  misc_feature (4)..(11): Crosslink between residues
  MOD_RES (11)..(11): Alpha-Me S5-pentenyl-alanine olefin amino acid connected by an all-carbon crosslinker comprising one double bond
  C-term NH2
XTFAAYWAQLAS

SEQ ID NO: 1375 - protein, 12 aa, Artificial Sequence
  Description of Artificial Sequence: Synthetic peptide
  N-term Ac
  MOD_RES (1)..(1): Alpha-Me-Phe
  MOD_RES (4)..(4): Alpha-Me R8-octenyl-alanine olefin amino acid connected by an all-carbon crosslinker comprising one double bond
  misc_feature (4)..(11): Crosslink between residues
  MOD_RES (11)..(11): Alpha-Me S5-pentenyl-alanine olefin amino acid connected by an all-carbon crosslinker comprising one double bond
  C-term NH2
FTFAAYWAQLAS

SEQ ID NO: 1376 - protein, 12 aa, Artificial Sequence
  Description of Artificial Sequence: Synthetic peptide
  N-term Ac
  MOD_RES (1)..(1): Alpha-Me-Trp
  MOD_RES (4)..(4): Alpha-Me R8-octenyl-alanine olefin amino acid connected by an all-carbon crosslinker comprising one double bond
  misc_feature (4)..(11): Crosslink between residues
  MOD_RES (11)..(11): Alpha-Me S5-pentenyl-alanine olefin amino acid connected by an all-carbon crosslinker comprising one double bond
  C-term NH2
WTFAAYWAQLAS

SEQ ID NO: 1377 - protein, 12 aa, Artificial Sequence
  Description of Artificial Sequence: Synthetic peptide
  N-term Ac
  MOD_RES (1)..(1): N-methyl-Leu
  MOD_RES (4)..(4): Alpha-Me R8-octenyl-alanine olefin amino acid connected by an all-carbon crosslinker comprising one double bond
  misc_feature (4)..(11): Crosslink between residues
  MOD_RES (11)..(11): Alpha-Me S5-pentenyl-alanine olefin amino acid connected by an all-carbon crosslinker comprising one double bond
  C-term NH2
LTFAAYWAQLAS

SEQ ID NO: 1378 - protein, 12 aa, Artificial Sequence
  Description of Artificial Sequence: Synthetic peptide
  N-term Ac
  MOD_RES (2)..(2): N-methyl-Thr
  MOD_RES (4)..(4): Alpha-Me R8-octenyl-alanine olefin amino acid connected by an all-carbon crosslinker comprising one double bond
  misc_feature (4)..(11): Crosslink between residues
  MOD_RES (11)..(11): Alpha-Me S5-pentenyl-alanine olefin amino acid connected by an all-carbon crosslinker comprising one double bond
  C-term NH2
LTFAAYWAQLAS

SEQ ID NO: 1379 - protein, 12 aa, Artificial Sequence
  Description of Artificial Sequence: Synthetic peptide
  N-term Ac
  MOD_RES (2)..(2): Sarcosine
  MOD_RES (4)..(4): Alpha-Me R8-octenyl-alanine olefin amino acid connected by an all-carbon crosslinker comprising one double bond
  misc_feature (4)..(11): Crosslink between residues
  MOD_RES (11)..(11): Alpha-Me S5-pentenyl-alanine olefin amino acid connected by an all-carbon crosslinker comprising one double bond
  C-term NH2
LXFAAYWAQLAS

SEQ ID NO: 1380 - protein, 12 aa, Artificial Sequence
  Description of Artificial Sequence: Synthetic peptide
  N-term Ac
  MOD_RES (4)..(4): Alpha-Me R8-octenyl-alanine olefin amino acid connected by an all-carbon crosslinker comprising one double bond
  misc_feature (4)..(11): Crosslink between residues
  MOD_RES (11)..(11): Alpha-Me S5-pentenyl-alanine olefin amino acid connected by an all-carbon crosslinker comprising one double bond
  C-term NH2
LGFAAYWAQLAS

SEQ ID NO: 1381 - protein, 12 aa, Artificial Sequence
  Description of Artificial Sequence: Synthetic peptide
  N-term Ac
  MOD_RES (3)..(3): N-methyl-Phe
  MOD_RES (4)..(4): Alpha-Me R8-octenyl-alanine olefin amino acid connected by an all-carbon crosslinker comprising one double bond
  misc_feature (4)..(11): Crosslink between residues
  MOD_RES (11)..(11): Alpha-Me S5-pentenyl-alanine olefin amino acid connected by an all-carbon crosslinker comprising one double bond
  C-term NH2
LTFAAYWAQLAS

SEQ ID NO: 1382 - protein, 11 aa, Artificial Sequence
  Description of Artificial Sequence: Synthetic peptide
  N-term Ac
  MOD_RES (3)..(3): Alpha-Me R8-octenyl-alanine olefin amino acid connected by an all-carbon crosslinker comprising one double bond
  misc_feature (3)..(10): Crosslink between residues
  MOD_RES (10)..(10): Alpha-Me S5-pentenyl-alanine olefin amino acid connected by an all-carbon crosslinker comprising one double bond
  C-term NH2
TFAAYWAQLAS

SEQ ID NO: 1383 - protein, 12 aa, Artificial Sequence
  Description of Artificial Sequence: Synthetic peptide
  N-term Ac
  MOD_RES (4)..(4): Alpha-Me R8-octenyl-alanine olefin amino acid connected by an all-carbon crosslinker comprising one double bond
  misc_feature (4)..(11): Crosslink between residues
  MOD_RES (11)..(11): Alpha-Me S5-pentenyl-alanine olefin amino acid connected by an all-carbon crosslinker comprising one double bond
  C-term NH2
ETFAAYWAQLAA

SEQ ID NO: 1384 - protein, 12 aa, Artificial Sequence
  Description of Artificial Sequence: Synthetic peptide
  N-term Ac
  MOD_RES (4)..(4): Alpha-Me R8-octenyl-alanine olefin amino acid connected by an all-carbon crosslinker comprising one double bond
  misc_feature (4)..(11): Crosslink between residues
  MOD_RES (11)..(11): Alpha-Me S5-pentenyl-alanine olefin amino acid connected by an all-carbon crosslinker comprising one double bond
  C-term NH2
LTFAEYWAQLAA

SEQ ID NO: 1385 - protein, 12 aa, Artificial Sequence
  Description of Artificial Sequence: Synthetic peptide
  N-term Ac
  MOD_RES (3)..(3): 2-Naphthalanine
  MOD_RES (4)..(4): Alpha-Me R8-octenyl-alanine olefin amino acid connected by an all-carbon crosslinker comprising one double bond
  misc_feature (4)..(11): Crosslink between residues
  MOD_RES (11)..(11): Alpha-Me S5-pentenyl-alanine olefin amino acid connected by an all-carbon crosslinker comprising one double bond
  C-term NH2
LTAAAYWSQLAS

SEQ ID NO: 1386 - protein, 12 aa, Artificial Sequence
  Description of Artificial Sequence: Synthetic peptide
  N-term Ac
  MOD_RES (4)..(4): Alpha-Me R8-octenyl-alanine olefin amino acid connected by an all-carbon crosslinker comprising one double bond
  misc_feature (4)..(11): Crosslink between residues
  MOD_RES (11)..(11): Alpha-Me S5-pentenyl-alanine olefin amino acid connected by an all-carbon crosslinker comprising one double bond
  C-term NH2
LTFAAYWAALAS

SEQ ID NO: 1387 - protein, 12 aa, Artificial Sequence
  Description of Artificial Sequence: Synthetic peptide
  N-term Ac
  MOD_RES (4)..(4): Alpha-Me R8-octenyl-alanine olefin amino acid connected by an all-carbon crosslinker comprising one double bond
  misc_feature (4)..(11): Crosslink between residues
  MOD_RES (10)..(10): homo-cyclohexyl-Ala
  MOD_RES (11)..(11): Alpha-Me S5-pentenyl-alanine olefin amino acid connected by an all-carbon crosslinker comprising one double bond
  C-term NH2
LTFAAYWAQAAS

SEQ ID NO: 1388 - protein, 12 aa, Artificial Sequence
  Description of Artificial Sequence: Synthetic peptide
  N-term Ac
  MOD_RES (4)..(4): Alpha-Me R8-octenyl-alanine olefin amino acid connected by an all-carbon crosslinker comprising one double bond
  misc_feature (4)..(11): Crosslink between residues
  MOD_RES (10)..(10): Cyclohexyl-Gly
  MOD_RES (11)..(11): Alpha-Me S5-pentenyl-alanine olefin amino acid connected by an all-carbon crosslinker comprising one double bond
  C-term NH2
LTFAAYWAQGAS

SEQ ID NO: 1389 - protein, 12 aa, Artificial Sequence
  Description of Artificial Sequence: Synthetic peptide
  N-term Ac
  MOD_RES (4)..(4): Alpha-Me R8-octenyl-alanine olefin amino acid connected by an all-carbon crosslinker comprising one double bond
  misc_feature (4)..(11): Crosslink between residues
  MOD_RES (10)..(10): Cyclobutyl-Ala
  MOD_RES (11)..(11): Alpha-Me S5-pentenyl-alanine olefin amino acid connected by an all-carbon crosslinker comprising one double bond
  C-term NH2
LTFAAYWAQAAS

SEQ ID NO: 1390 - protein, 12 aa, Artificial Sequence
  Description of Artificial Sequence: Synthetic peptide
  N-term Ac
  MOD_RES (4)..(4): Alpha-Me R8-octenyl-alanine olefin amino acid connected by an all-carbon crosslinker comprising one double bond
  misc_feature (4)..(11): Crosslink between residues
  MOD_RES (10)..(10): Phe-3CF3
  MOD_RES (11)..(11): Alpha-Me S5-pentenyl-alanine olefin amino acid connected by an all-carbon crosslinker comprising one double bond
  C-term NH2
LTFAAYWAQFAS

SEQ ID NO: 1391 - protein, 12 aa, Artificial Sequence
  Description of Artificial Sequence: Synthetic peptide
  N-term Ac
  MOD_RES (4)..(4): Alpha-Me R8-octenyl-alanine olefin amino acid connected by an all-carbon crosslinker comprising one double bond
  misc_feature (4)..(11): Crosslink between residues
  MOD_RES (10)..(10): 1-Naphthalanine
  MOD_RES (11)..(11): Alpha-Me S5-pentenyl-alanine olefin amino acid connected by an all-carbon crosslinker comprising one double bond
  C-term NH2
LTFAAYWAQAAS

SEQ ID NO: 1392 - protein, 12 aa, Artificial Sequence
  Description of Artificial Sequence: Synthetic peptide
  N-term Ac
  MOD_RES (4)..(4): Alpha-Me R8-octenyl-alanine olefin amino acid connected by an all-carbon crosslinker comprising one double bond
  misc_feature (4)..(11): Crosslink between residues
  MOD_RES (10)..(10): Bi-Phe
  MOD_RES (11)..(11): Alpha-Me S5-pentenyl-alanine olefin amino acid connected by an all-carbon crosslinker comprising one double bond
  C-term NH2
LTFAAYWAQFAS

SEQ ID NO: 1393 - protein, 12 aa, Artificial Sequence
  Description of Artificial Sequence: Synthetic peptide
  N-term Ac
  MOD_RES (3)..(3): 2-Naphthalanine
  MOD_RES (4)..(4): Alpha-Me R8-octenyl-alanine olefin amino acid connected by an all-carbon crosslinker comprising one double bond
  misc_feature (4)..(11): Crosslink between residues
  MOD_RES (11)..(11): Alpha-Me S5-pentenyl-alanine olefin amino acid connected by an all-carbon crosslinker comprising one double bond
  C-term NH2
LTAAAYWAQLAS

SEQ ID NO: 1394 - protein, 12 aa, Artificial Sequence
  Description of Artificial Sequence: Synthetic peptide
  N-term Ac
  MOD_RES (4)..(4): Alpha-Me R8-octenyl-alanine olefin amino acid connected by an all-carbon crosslinker comprising one double bond
  misc_feature (4)..(11): Crosslink between residues
  MOD_RES (11)..(11): Alpha-Me S5-pentenyl-alanine olefin amino acid connected by an all-carbon crosslinker comprising one double bond
  C-term NH2
LTFAAYWVQLAS

SEQ ID NO: 1395 - protein, 12 aa, Artificial Sequence
  Description of Artificial Sequence: Synthetic peptide
  N-term Ac
  MOD_RES (4)..(4): Alpha-Me R8-octenyl-alanine olefin amino acid connected by an all-carbon crosslinker comprising one double bond
  misc_feature (4)..(11): Crosslink between residues
  MOD_RES (11)..(11): Alpha-Me S5-pentenyl-alanine olefin amino acid connected by an all-carbon crosslinker comprising one double bond
  C-term NH2
LTFAAWWAQLAS

SEQ ID NO: 1396 - protein, 12 aa, Artificial Sequence
  Description of Artificial Sequence: Synthetic peptide
  N-term Ac
  MOD_RES (4)..(4): Alpha-Me R8-octenyl-alanine olefin amino acid connected by an all-carbon crosslinker comprising one double bond
  misc_feature (4)..(11): Crosslink between residues
  MOD_RES (11)..(11): Alpha-Me S5-pentenyl-alanine olefin amino acid connected by an all-carbon crosslinker comprising one double bond
  C-term NH2
FTFAVYWSQLAS

SEQ ID NO: 1397 - protein, 12 aa, Artificial Sequence
  Description of Artificial Sequence: Synthetic peptide
  N-term Ac
  MOD_RES (4)..(4): Alpha-Me R8-octenyl-alanine olefin amino acid connected by an all-carbon crosslinker comprising one double bond
  misc_feature (4)..(11): Crosslink between residues
  MOD_RES (11)..(11): Alpha-Me S5-pentenyl-alanine olefin amino acid connected by an all-carbon crosslinker comprising one double bond
  C-term NH2
ITFAFYWAQLAS

SEQ ID NO: 1398 - protein, 12 aa, Artificial Sequence
  Description of Artificial Sequence: Synthetic peptide
  N-term Ac
  MOD_RES (4)..(4): Alpha-Me R8-octenyl-alanine olefin amino acid connected by an all-carbon crosslinker comprising one double bond
  misc_feature (4)..(11): Crosslink between residues
  MOD_RES (11)..(11): Alpha-Me S5-pentenyl-alanine olefin amino acid connected by an all-carbon crosslinker comprising one double bond
  C-term NH2
ITFALYWSQLAS

SEQ ID NO: 1399 - protein, 12 aa, Artificial Sequence
  Description of Artificial Sequence: Synthetic peptide
  N-term Ac
  MOD_RES (4)..(4): Alpha-Me R8-octenyl-alanine olefin amino acid connected by an all-carbon crosslinker comprising one double bond
  misc_feature (4)..(11): Crosslink between residues
  MOD_RES (11)..(11): Alpha-Me S5-pentenyl-alanine olefin amino acid connected by an all-carbon crosslinker comprising one double bond
  C-term NH2
FTFAFYWAQLAS

SEQ ID NO: 1400 - protein, 12 aa, Artificial Sequence
  Description of Artificial Sequence: Synthetic peptide
  N-term Ac
  MOD_RES (4)..(4): Alpha-Me R8-octenyl-alanine olefin amino acid connected by an all-carbon crosslinker comprising one double bond
  misc_feature (4)..(11): Crosslink between residues
  MOD_RES (11)..(11): Alpha-Me S5-pentenyl-alanine olefin amino acid connected by an all-carbon crosslinker comprising one double bond
  C-term NH2
VTFAAYWSQLAS

SEQ ID NO: 1401 - protein, 12 aa, Artificial Sequence
  Description of Artificial Sequence: Synthetic peptide
  N-term Ac
  MOD_RES (4)..(4): Alpha-Me R8-octenyl-alanine olefin amino acid connected by an all-carbon crosslinker comprising one double bond
  misc_feature (4)..(11): Crosslink between residues
  MOD_RES (11)..(11): Alpha-Me S5-pentenyl-alanine olefin amino acid connected by an all-carbon crosslinker comprising one double bond
  C-term NH2
LTFAAHWAQLAS

SEQ ID NO: 1402 - protein, 12 aa, Artificial Sequence
  Description of Artificial Sequence: Synthetic peptide
  N-term Ac
  MOD_RES (4)..(4): Alpha-Me R8-octenyl-alanine olefin amino acid connected by an all-carbon crosslinker comprising one double bond
  misc_feature (4)..(11): Crosslink between residues
  MOD_RES (11)..(11): Alpha-Me S5-pentenyl-alanine olefin amino acid connected by an all-carbon crosslinker comprising one double bond
  C-term NH2
LTFAAYWAQLAH

SEQ ID NO: 1403 - protein, 12 aa, Artificial Sequence
  Description of Artificial Sequence: Synthetic peptide
  N-term Ac
  MOD_RES (4)..(4): Alpha-Me R8-octenyl-alanine olefin amino acid connected by an all-carbon crosslinker comprising one double bond
  misc_feature (4)..(11): Crosslink between residues
  MOD_RES (11)..(11): Alpha-Me S5-pentenyl-alanine olefin amino acid connected by an all-carbon crosslinker comprising one double bond
  C-term NH2
LTFAAYWAHLAS

SEQ ID NO: 1404 - protein, 14 aa, Artificial Sequence
  Description of Artificial Sequence: Synthetic peptide
  N-term Ac
  MOD_RES (1)..(1): D-amino acid
  MOD_RES (2)..(2): 2-aminoisobutyric acid
  MOD_RES (6)..(6): Alpha-Me R8-octenyl-alanine olefin amino acid connected by an all-carbon crosslinker comprising one double bond
  misc_feature (6)..(13): Crosslink between residues
  MOD_RES (13)..(13): Alpha-Me S5-pentenyl-alanine olefin amino acid connected by an all-carbon crosslinker comprising one double bond
  C-term NH2
AXWTFAVYWSQLAS

SEQ ID NO: 1405 - protein, 13 aa, Artificial Sequence
  Description of Artificial Sequence: Synthetic peptide
  N-term Ac
  MOD_RES (1)..(1): 2-aminoisobutyric acid
  MOD_RES (5)..(5): Alpha-Me R8-octenyl-alanine olefin amino acid connected by an all-carbon crosslinker comprising one double bond
  misc_feature (5)..(12): Crosslink between residues
  MOD_RES (12)..(12): Alpha-Me S5-pentenyl-alanine olefin amino acid connected by an all-carbon crosslinker comprising one double bond
  C-term NH2
XWTFAHYWAQLAS

SEQ ID NO: 1406 - protein, 14 aa, Artificial Sequence
  Description of Artificial Sequence: Synthetic peptide
  N-term Ac
  MOD_RES (1)..(1): 2-aminoisobutyric acid
  MOD_RES (6)..(6): Alpha-Me R8-octenyl-alanine olefin amino acid connected by an all-carbon crosslinker comprising one double bond
  misc_feature (6)..(13): Crosslink between residues
  MOD_RES (13)..(13): Alpha-Me S5-pentenyl-alanine olefin amino acid connected by an all-carbon crosslinker comprising one double bond
  C-term NH2
XAWTFAHYWAQLAS

SEQ ID NO: 1407 - protein, 13 aa, Artificial Sequence
  Description of Artificial Sequence: Synthetic peptide
  N-term Ac
  MOD_RES (1)..(1): D-amino acid
  MOD_RES (5)..(5): Alpha-Me R8-octenyl-alanine olefin amino acid connected by an all-carbon crosslinker comprising one double bond
  misc_feature (5)..(12): Crosslink between residues
  MOD_RES (12)..(12): Alpha-Me S5-pentenyl-alanine olefin amino acid connected by an all-carbon crosslinker comprising one double bond
  C-term NH2
FWTFAHYWAQLAS

SEQ ID NO: 1408 - protein, 14 aa, Artificial Sequence
  Description of Artificial Sequence: Synthetic peptide
  N-term Ac
  MOD_RES (1)..(1): 2-aminoisobutyric acid
  MOD_RES (6)..(6): Alpha-Me R8-octenyl-alanine olefin amino acid connected by an all-carbon crosslinker comprising one double bond
  misc_feature (6)..(13): Crosslink between residues
  MOD_RES (13)..(13): Alpha-Me S5-pentenyl-alanine olefin amino acid connected by an all-carbon crosslinker comprising one double bond
  C-term NH2
XWWTFAHYWAQLAS

SEQ ID NO: 1409 - protein, 12 aa, Artificial Sequence
  Description of Artificial Sequence: Synthetic peptide
  N-term Ac
  MOD_RES (4)..(4): Alpha-Me R8-octenyl-alanine olefin amino acid connected by an all-carbon crosslinker comprising one double bond
  misc_feature (4)..(11): Crosslink between residues
  MOD_RES (11)..(11): Alpha-Me S5-pentenyl-alanine olefin amino acid connected by an all-carbon crosslinker comprising one double bond
  C-term NH2
WTFALYWSQLAS

SEQ ID NO: 1410 - protein, 12 aa, Artificial Sequence
  Description of Artificial Sequence: Synthetic peptide
  N-term Ac
  MOD_RES (4)..(4): Alpha-Me R8-octenyl-alanine olefin amino acid connected by an all-carbon crosslinker comprising one double bond
  misc_feature (4)..(11): Crosslink between residues
  MOD_RES (5)..(5): Norleucine
  MOD_RES (11)..(11): Alpha-Me S5-pentenyl-alanine olefin amino acid connected by an all-carbon crosslinker comprising one double bond
  C-term NH2
WTFALYWSQLAS

SEQ ID NO: 1411 - protein, 12 aa, Artificial Sequence
  Description of Artificial Sequence: Synthetic peptide
  N-term Ac
  MOD_RES (4)..(4): Alpha-Me R8-octenyl-alanine olefin amino acid connected by an all-carbon crosslinker comprising one double bond
  misc_feature (4)..(11): Crosslink between residues
  MOD_RES (11)..(11): Alpha-Me S5-pentenyl-alanine olefin amino acid connected by an all-carbon crosslinker comprising one double bond
  MOD_RES (12)..(12): D-amino acid
  C-term NH2
LTFAAYWSQLAA

SEQ ID NO: 1412 - protein, 12 aa, Artificial Sequence
  Description of Artificial Sequence: Synthetic peptide
  N-term Ac
  MOD_RES (4)..(4): Alpha-Me R8-octenyl-alanine olefin amino acid connected by an all-carbon crosslinker comprising one double bond
  misc_feature (4)..(11): Crosslink between residues
  MOD_RES (11)..(11): Alpha-Me S5-pentenyl-alanine olefin amino acid connected by an all-carbon crosslinker comprising one double bond
  C-term NH2
LTFAEYWARLAA

SEQ ID NO: 1413 - protein, 12 aa, Artificial Sequence
  Description of Artificial Sequence: Synthetic peptide
  N-term Ac
  MOD_RES (4)..(4): Alpha-Me R8-octenyl-alanine olefin amino acid connected by an all-carbon crosslinker comprising one double bond
  misc_feature (4)..(11): Crosslink between residues
  MOD_RES (11)..(11): Alpha-Me S5-pentenyl-alanine olefin amino acid connected by an all-carbon crosslinker comprising one double bond
  C-term NH2
LTFAEYWAHLAA

SEQ ID NO: 1414 - protein, 12 aa, Artificial Sequence
  Description of Artificial Sequence: Synthetic peptide
  N-term Ac
  MOD_RES (1)..(1): D-amino acid
  MOD_RES (4)..(4): Alpha-Me R8-octenyl-alanine olefin amino acid connected by an all-carbon crosslinker comprising one double bond
  misc_feature (4)..(11): Crosslink between residues
  MOD_RES (11)..(11): Alpha-Me S5-pentenyl-alanine olefin amino acid connected by an all-carbon crosslinker comprising one double bond
  C-term NH2
ATFAAYWAQLAS

SEQ ID NO: 1415 - protein, 12 aa, Artificial Sequence
  Description of Artificial Sequence: Synthetic peptide
  N-term Ac
  MOD_RES (1)..(1): 2-aminoisobutyric acid
  MOD_RES (4)..(4): Alpha-Me R8-octenyl-alanine olefin amino acid connected by an all-carbon crosslinker comprising one double bond
  misc_feature (4)..(11): Crosslink between residues
  MOD_RES (11)..(11): Alpha-Me S5-pentenyl-alanine olefin amino acid connected by an all-carbon crosslinker comprising one double bond
  C-term NH2
XTFAAYWAQLAS

SEQ ID NO: 1416 - protein, 12 aa, Artificial Sequence
  Description of Artificial Sequence: Synthetic peptide
  N-term Ac
  MOD_RES (1)..(1): Alpha-Me-Phe
  MOD_RES (4)..(4): Alpha-Me R8-octenyl-alanine olefin amino acid connected by an all-carbon crosslinker comprising one double bond
  misc_feature (4)..(11): Crosslink between residues
  MOD_RES (11)..(11): Alpha-Me S5-pentenyl-alanine olefin amino acid connected by an all-carbon crosslinker comprising one double bond
  C-term NH2
FTFAAYWAQLAS

SEQ ID NO: 1417 - protein, 12 aa, Artificial Sequence
  Description of Artificial Sequence: Synthetic peptide
  N-term Ac
  MOD_RES (1)..(1): Alpha-Me-Trp
  MOD_RES (4)..(4): Alpha-Me R8-octenyl-alanine olefin amino acid connected by an all-carbon crosslinker comprising one double bond
  misc_feature (4)..(11): Crosslink between residues
  MOD_RES (11)..(11): Alpha-Me S5-pentenyl-alanine olefin amino acid connected by an all-carbon crosslinker comprising one double bond
  C-term NH2
WTFAAYWAQLAS

SEQ ID NO: 1418 - protein, 12 aa, Artificial Sequence
  Description of Artificial Sequence: Synthetic peptide
  N-term Ac
  MOD_RES (1)..(1): N-methyl-Leu
  MOD_RES (4)..(4): Alpha-Me R8-octenyl-alanine olefin amino acid connected by an all-carbon crosslinker comprising one double bond
  misc_feature (4)..(11): Crosslink between residues
  MOD_RES (11)..(11): Alpha-Me S5-pentenyl-alanine olefin amino acid connected by an all-carbon crosslinker comprising one double bond
  C-term NH2
LTFAAYWAQLAS

SEQ ID NO: 1419 - protein, 12 aa, Artificial Sequence
  Description of Artificial Sequence: Synthetic peptide
  N-term Ac
  MOD_RES (2)..(2): N-methyl-Thr
  MOD_RES (4)..(4): Alpha-Me R8-octenyl-alanine olefin amino acid connected by an all-carbon crosslinker comprising one double bond
  misc_feature (4)..(11): Crosslink between residues
  MOD_RES (11)..(11): Alpha-Me S5-pentenyl-alanine olefin amino acid connected by an all-carbon crosslinker comprising one double bond
  C-term NH2
LTFAAYWAQLAS

SEQ ID NO: 1420 - protein, 12 aa, Artificial Sequence
  Description of Artificial Sequence: Synthetic peptide
  N-term Ac
  MOD_RES (2)..(2): Sarcosine
  MOD_RES (4)..(4): Alpha-Me R8-octenyl-alanine olefin amino acid connected by an all-carbon crosslinker comprising one double bond
  misc_feature (4)..(11): Crosslink between residues
  MOD_RES (11)..(11): Alpha-Me S5-pentenyl-alanine olefin amino acid connected by an all-carbon crosslinker comprising one double bond
  C-term NH2
LXFAAYWAQLAS

SEQ ID NO: 1421 - protein, 11 aa, Artificial Sequence
  Description of Artificial Sequence: Synthetic peptide
  N-term Ac
  MOD_RES (3)..(3): Alpha-Me R8-octenyl-alanine olefin amino acid connected by an all-carbon crosslinker comprising one double bond
  misc_feature (3)..(10): Crosslink between residues
  MOD_RES (10)..(10): Alpha-Me S5-pentenyl-alanine olefin amino acid connected by an all-carbon crosslinker comprising one double bond
  C-term NH2
TFAAYWAQLAS

SEQ ID NO: 1422 - protein, 12 aa, Artificial Sequence
  Description of Artificial Sequence: Synthetic peptide
  N-term Ac
  MOD_RES (4)..(4): Alpha-Me R8-octenyl-alanine olefin amino acid connected by an all-carbon crosslinker comprising one double bond
  misc_feature (4)..(11): Crosslink between residues
  MOD_RES (11)..(11): Alpha-Me S5-pentenyl-alanine olefin amino acid connected by an all-carbon crosslinker comprising one double bond
  C-term NH2
ETFAAYWAQLAA

SEQ ID NO: 1423 - protein, 12 aa, Artificial Sequence
  Description of Artificial Sequence: Synthetic peptide
  N-term Ac
  MOD_RES (4)..(4): Alpha-Me R8-octenyl-alanine olefin amino acid connected by an all-carbon crosslinker comprising one double bond
  misc_feature (4)..(11): Crosslink between residues
  MOD_RES (11)..(11): Alpha-Me S5-pentenyl-alanine olefin amino acid connected by an all-carbon crosslinker comprising one double bond
  C-term NH2
LTFAEYWAQLAA

SEQ ID NO: 1424 - protein, 12 aa, Artificial Sequence
  Description of Artificial Sequence: Synthetic peptide
  N-term Ac
  MOD_RES (4)..(4): Alpha-Me R8-octenyl-alanine olefin amino acid connected by an all-carbon crosslinker comprising one double bond
  misc_feature (4)..(11): Crosslink between residues
  MOD_RES (11)..(11): Alpha-Me S5-pentenyl-alanine olefin amino acid connected by an all-carbon crosslinker comprising one double bond
  C-term NH2
WTFAVYWSQLAS

SEQ ID NO: 1425 - protein, 12 aa, Artificial Sequence
  Description of Artificial Sequence: Synthetic peptide
  N-term Ac
  MOD_RES (4)..(4): Alpha-Me R8-octenyl-alanine olefin amino acid connected by an all-carbon crosslinker comprising one double bond
  misc_feature (4)..(11): Crosslink between residues
  MOD_RES (11)..(11): Alpha-Me S5-pentenyl-alanine olefin amino acid connected by an all-carbon crosslinker comprising one double bond
  C-term NH2
YTFAFYWSQLAS

SEQ ID NO: 1426 - protein, 10 aa, Artificial Sequence
  Description of Artificial Sequence: Synthetic peptide
  N-term Ac
  MOD_RES (2)..(2): Alpha-Me R8-octenyl-alanine olefin amino acid connected by an all-carbon crosslinker comprising one double bond
  misc_feature (2)..(9): Crosslink between residues
  MOD_RES (5)..(5): 6cl-Trp
  MOD_RES (9)..(9): Alpha-Me S5-pentenyl-alanine olefin amino acid connected by an all-carbon crosslinker comprising one double bond
  C-term NH2
FAAYWSALAA

SEQ ID NO: 1427 - protein, 12 aa, Artificial Sequence
  Description of Artificial Sequence: Synthetic peptide
  N-term Ac
  MOD_RES (4)..(4): Alpha-Me R8-octenyl-alanine olefin amino acid connected by an all-carbon crosslinker comprising one double bond
  misc_feature (4)..(11): Crosslink between residues
  MOD_RES (11)..(11): Alpha-Me S5-pentenyl-alanine olefin amino acid connected by an all-carbon crosslinker comprising one double bond
  C-term NH2
ETFAEYWVQLAS

SEQ ID NO: 1428 - protein, 12 aa, Artificial Sequence
  Description of Artificial Sequence: Synthetic peptide
  N-term Ac
  MOD_RES (4)..(4): Alpha-Me R8-octenyl-alanine olefin amino acid connected by an all-carbon crosslinker comprising one double bond
  misc_feature (4)..(11): Crosslink between residues
  MOD_RES (11)..(11): Alpha-Me S5-pentenyl-alanine olefin amino acid connected by an all-carbon crosslinker comprising one double bond
  C-term NH2
ETFAEHWAQLAA

SEQ ID NO: 1429 - protein, 12 aa, Artificial Sequence
  Description of Artificial Sequence: Synthetic peptide
  N-term Ac
  MOD_RES (4)..(4): Alpha-Me R8-octenyl-alanine olefin amino acid connected by an all-carbon crosslinker comprising one double bond
  misc_feature (4)..(11): Crosslink between residues
  MOD_RES (11)..(11): Alpha-Me S5-pentenyl-alanine olefin amino acid connected by an all-carbon crosslinker comprising one double bond
  C-term NH2
ITFAEYWAQLAS

SEQ ID NO: 1430 - protein, 12 aa, Artificial Sequence
  Description of Artificial Sequence: Synthetic peptide
  N-term Ac
  MOD_RES (4)..(4): Alpha-Me R8-octenyl-alanine olefin amino acid connected by an all-carbon crosslinker comprising one double bond
  misc_feature (4)..(11): Crosslink between residues
  MOD_RES (11)..(11): Alpha-Me S5-pentenyl-alanine olefin amino acid connected by an all-carbon crosslinker comprising one double bond
  C-term NH2
ITFAEHWVQLAA

SEQ ID NO: 1431 - protein, 12 aa, Artificial Sequence
  Description of Artificial Sequence: Synthetic peptide
  N-term Ac
  MOD_RES (4)..(4): Alpha-Me R8-octenyl-alanine olefin amino acid connected by an all-carbon crosslinker comprising one double bond
  misc_feature (4)..(11): Crosslink between residues
  MOD_RES (11)..(11): Alpha-Me S5-pentenyl-alanine olefin amino acid connected by an all-carbon crosslinker comprising one double bond
  C-term NH2
ITFAEHWAQLAS

SEQ ID NO: 1432 - protein, 12 aa, Artificial Sequence
  Description of Artificial Sequence: Synthetic peptide
  N-term Ac
  MOD_RES (3)..(3): Phe-4F
  MOD_RES (4)..(4): Alpha-Me R8-octenyl-alanine olefin amino acid connected by an all-carbon crosslinker comprising one double bond
  misc_feature (4)..(11): Crosslink between residues
  MOD_RES (10)..(10): Cyclobutyl-Ala
  MOD_RES (11)..(11): Alpha-Me S5-pentenyl-alanine olefin amino acid connected by an all-carbon crosslinker comprising one double bond
  C-term NH2
LTFAAYWAQAAS

SEQ ID NO: 1433 - protein, 12 aa, Artificial Sequence
  Description of Artificial Sequence: Synthetic peptide
  N-term Ac
  MOD_RES (3)..(3): 3-Chloro-Phe
  MOD_RES (4)..(4): Alpha-Me R8-octenyl-alanine olefin amino acid connected by an all-carbon crosslinker comprising one double bond
  misc_feature (4)..(11): Crosslink between residues
  MOD_RES (10)..(10): hLeu
  MOD_RES (11)..(11): Alpha-Me S5-pentenyl-alanine olefin amino acid connected by an all-carbon crosslinker comprising one double bond
  C-term NH2
LTFAAYWAQLAS

SEQ ID NO: 1434 - protein, 12 aa, Artificial Sequence
  Description of Artificial Sequence: Synthetic peptide
  N-term Ac
  MOD_RES (3)..(3): 3-Chloro-Phe
  MOD_RES (4)..(4): Alpha-Me R8-octenyl-alanine olefin amino acid connected by an all-carbon crosslinker comprising one double bond
  misc_feature (4)..(11): Crosslink between residues
  MOD_RES (10)..(10): Cyclohexyl-Ala
  MOD_RES (11)..(11): Alpha-Me S5-pentenyl-alanine olefin amino acid connected by an all-carbon crosslinker comprising one double bond
  C-term NH2
LTFAAYWAQAAS

SEQ ID NO: 1435 - protein, 12 aa, Artificial Sequence
  Description of Artificial Sequence: Synthetic peptide
  N-term Ac
  MOD_RES (3)..(3): 3-Chloro-Phe
  MOD_RES (4)..(4): Alpha-Me R8-octenyl-alanine olefin amino acid connected by an all-carbon crosslinker comprising one double bond
  misc_feature (4)..(11): Crosslink between residues
  MOD_RES (10)..(10): Cyclohexyl-Gly
  MOD_RES (11)..(11): Alpha-Me S5-pentenyl-alanine olefin amino acid connected by an all-carbon crosslinker comprising one double bond
  C-term NH2
LTFAAYWAQGAS

SEQ ID NO: 1436 - protein, 12 aa, Artificial Sequence
  Description of Artificial Sequence: Synthetic peptide
  N-term Ac
  MOD_RES (3)..(3): 3-Chloro-Phe
  MOD_RES (4)..(4): Alpha-Me R8-octenyl-alanine olefin amino acid connected by an all-carbon crosslinker comprising one double bond
  misc_feature (4)..(11): Crosslink between residues
  MOD_RES (10)..(10): Cyclobutyl-Ala
  MOD_RES (11)..(11): Alpha-Me S5-pentenyl-alanine olefin amino acid connected by an all-carbon crosslinker comprising one double bond
  C-term NH2
LTFAAYWAQAAS

SEQ ID NO: 1437 - protein, 12 aa, Artificial Sequence
  Description of Artificial Sequence: Synthetic peptide
  N-term Ac
  MOD_RES (4)..(4): Alpha-Me R8-octenyl-alanine olefin amino acid connected by an all-carbon crosslinker comprising one double bond
  misc_feature (4)..(11): Crosslink between residues
  MOD_RES (7)..(7): 6cl-Trp
  MOD_RES (11)..(11): Alpha-Me S5-pentenyl-alanine olefin amino acid connected by an all-carbon crosslinker comprising one double bond
  C-term NH2
LTFAAYWSQLAS

SEQ ID NO: 1438 - protein, 12 aa, Artificial Sequence
  Description of Artificial Sequence: Synthetic peptide
  N-term Ac
  MOD_RES (3)..(3): Phe-4F
  MOD_RES (4)..(4): Alpha-Me R8-octenyl-alanine olefin amino acid connected by an all-carbon crosslinker comprising one double bond
  misc_feature (4)..(11): Crosslink between residues
  MOD_RES (10)..(10): hLeu
  MOD_RES (11)..(11): Alpha-Me S5-pentenyl-alanine olefin amino acid connected by an all-carbon crosslinker comprising one double bond
  C-term NH2
LTFAHYWAQLAS

SEQ ID NO: 1439 - protein, 12 aa, Artificial Sequence
  Description of Artificial Sequence: Synthetic peptide
  N-term Ac
  MOD_RES (3)..(3): Phe-4F
  MOD_RES (4)..(4): Alpha-Me R8-octenyl-alanine olefin amino acid connected by an all-carbon crosslinker comprising one double bond
  misc_feature (4)..(11): Crosslink between residues
  MOD_RES (10)..(10): Cyclobutyl-Ala
  MOD_RES (11)..(11): Alpha-Me S5-pentenyl-alanine olefin amino acid connected by an all-carbon crosslinker comprising one double bond
  C-term NH2
LTFAHYWAQAAS

SEQ ID NO: 1440 - protein, 12 aa, Artificial Sequence
  Description of Artificial Sequence: Synthetic peptide
  N-term Ac
  MOD_RES (3)..(3): Phe-4F
  MOD_RES (4)..(4): Alpha-Me R8-octenyl-alanine olefin amino acid connected by an all-carbon crosslinker comprising one double bond
  misc_feature (4)..(11): Crosslink between residues
  MOD_RES (10)..(10): hLeu
  MOD_RES (11)..(11): Alpha-Me S5-pentenyl-alanine olefin amino acid connected by an all-carbon crosslinker comprising one double bond
  C-term NH2
LTFAAYWAQLAS

SEQ ID NO: 1441 - protein, 12 aa, Artificial Sequence
  Description of Artificial Sequence: Synthetic peptide
  N-term Ac
  MOD_RES (3)..(3): Phe-4F
  MOD_RES (4)..(4): Alpha-Me R8-octenyl-alanine olefin amino acid connected by an all-carbon crosslinker comprising one double bond
  misc_feature (4)..(11): Crosslink between residues
  MOD_RES (10)..(10): Cyclohexyl-Gly
  MOD_RES (11)..(11): Alpha-Me S5-pentenyl-alanine olefin amino acid connected by an all-carbon crosslinker comprising one double bond
  C-term NH2
LTFAAYWAQGAS

SEQ ID NO: 1442 - protein, 12 aa, Artificial Sequence
  Description of Artificial Sequence: Synthetic peptide
  N-term Ac
  MOD_RES (4)..(4): Alpha-Me R8-octenyl-alanine olefin amino acid connected by an all-carbon crosslinker comprising one double bond
  misc_feature (4)..(11): Crosslink between residues
  MOD_RES (11)..(11): Alpha-Me S5-pentenyl-alanine olefin amino acid connected by an all-carbon crosslinker comprising one double bond
  C-term NH2
ETFAEYWVALAS

SEQ ID NO: 1443 - protein, 12 aa, Artificial Sequence
  Description of Artificial Sequence: Synthetic peptide
  N-term Ac
  MOD_RES (4)..(4): Alpha-Me R8-octenyl-alanine olefin amino acid connected by an all-carbon crosslinker comprising one double bond
  misc_feature (4)..(11): Crosslink between residues
  MOD_RES (11)..(11): Alpha-Me S5-pentenyl-alanine olefin amino acid connected by an all-carbon crosslinker comprising one double bond
  C-term NH2
ETFAEHWAALAA

SEQ ID NO: 1444 - protein, 12 aa, Artificial Sequence
  Description of Artificial Sequence: Synthetic peptide
  N-term Ac
  MOD_RES (4)..(4): Alpha-Me R8-octenyl-alanine olefin amino acid connected by an all-carbon crosslinker comprising one double bond
  misc_feature (4)..(11): Crosslink between residues
  MOD_RES (11)..(11): Alpha-Me S5-pentenyl-alanine olefin amino acid connected by an all-carbon crosslinker comprising one double bond
  C-term NH2
ITFAEYWAALAS

SEQ ID NO: 1445 - protein, 12 aa, Artificial Sequence
  Description of Artificial Sequence: Synthetic peptide
  N-term Ac
  MOD_RES (4)..(4): Alpha-Me R8-octenyl-alanine olefin amino acid connected by an all-carbon crosslinker comprising one double bond
  misc_feature (4)..(11): Crosslink between residues
  MOD_RES (11)..(11): Alpha-Me S5-pentenyl-alanine olefin amino acid connected by an all-carbon crosslinker comprising one double bond
  C-term NH2
ITFAEHWVALAA

SEQ ID NO: 1446 - protein, 12 aa, Artificial Sequence
  Description of Artificial Sequence: Synthetic peptide
  N-term Ac
  MOD_RES (4)..(4): Alpha-Me R8-octenyl-alanine olefin amino acid connected by an all-carbon crosslinker comprising one double bond
  misc_feature (4)..(11): Crosslink between residues
  MOD_RES (11)..(11): Alpha-Me S5-pentenyl-alanine olefin amino acid connected by an all-carbon crosslinker comprising one double bond
  C-term NH2
ITFAEHWAALAS

SEQ ID NO: 1447 - protein, 12 aa, Artificial Sequence
  Description of Artificial Sequence: Synthetic peptide
  N-term Pam
  MOD_RES (4)..(4): Alpha-Me R8-octenyl-alanine olefin amino acid connected by an all-carbon crosslinker comprising one double bond
  misc_feature (4)..(11): Crosslink between residues
  MOD_RES (11)..(11): Alpha-Me S5-pentenyl-alanine olefin amino acid connected by an all-carbon crosslinker comprising one double bond
  C-term NH2
LTFAEYWAQLAS

SEQ ID NO: 1448 - protein, 12 aa, Artificial Sequence
  Description of Artificial Sequence: Synthetic peptide
  N-term Pam
  MOD_RES (4)..(4): Alpha-Me R8-octenyl-alanine olefin amino acid connected by an all-carbon crosslinker comprising one double bond
  misc_feature (4)..(11): Crosslink between residues
  MOD_RES (11)..(11): Alpha-Me S5-pentenyl-alanine olefin amino acid connected by an all-carbon crosslinker comprising one double bond
  C-term NH2
ETFAEYWAQLAS

SEQ ID NO: 1449 - protein, 12 aa, Artificial Sequence
  Description of Artificial Sequence: Synthetic peptide
  N-term Ac
  MOD_RES (4)..(4): Alpha-Me R8-octenyl-alanine olefin amino acid connected by an all-carbon crosslinker comprising one double bond
  misc_feature (4)..(11): Crosslink between residues
  MOD_RES (11)..(11): Alpha-Me S5-pentenyl-alanine olefin amino acid connected by an all-carbon crosslinker comprising one double bond
  C-term NH2
LTFAAYWLQLAS

SEQ ID NO: 1450 - protein, 12 aa, Artificial Sequence
  Description of Artificial Sequence: Synthetic peptide
  N-term Ac
  MOD_RES (4)..(4): Alpha-Me R8-octenyl-alanine olefin amino acid connected by an all-carbon crosslinker comprising one double bond
  misc_feature (4)..(11): Crosslink between residues
  MOD_RES (11)..(11): Alpha-Me S5-pentenyl-alanine olefin amino acid connected by an all-carbon crosslinker comprising one double bond
  C-term NH2
LTFAEYWLQLAS

SEQ ID NO: 1451 - protein, 12 aa, Artificial Sequence
  Description of Artificial Sequence: Synthetic peptide
  N-term Ac
  MOD_RES (4)..(4): Alpha-Me R8-octenyl-alanine olefin amino acid connected by an all-carbon crosslinker comprising one double bond
  misc_feature (4)..(11): Crosslink between residues
  MOD_RES (11)..(11): Alpha-Me S5-pentenyl-alanine olefin amino acid connected by an all-carbon crosslinker comprising one double bond
  C-term NH2
LTFAEHWLQLAS

SEQ ID NO: 1452 - protein, 12 aa, Artificial Sequence
  Description of Artificial Sequence: Synthetic peptide
  N-term Ac
  MOD_RES (4)..(4): Alpha-Me R8-octenyl-alanine olefin amino acid connected by an all-carbon crosslinker comprising one double bond
  misc_feature (4)..(11): Crosslink between residues
  MOD_RES (11)..(11): Alpha-Me S5-pentenyl-alanine olefin amino acid connected by an all-carbon crosslinker comprising one double bond
  C-term NH2
LTFAVYWAQLAS

SEQ ID NO: 1453 - protein, 12 aa, Artificial Sequence
  Description of Artificial Sequence: Synthetic peptide
  N-term Ac
  MOD_RES (4)..(4): Alpha-Me R8-octenyl-alanine olefin amino acid connected by an all-carbon crosslinker comprising one double bond
  misc_feature (4)..(11): Crosslink between residues
  MOD_RES (11)..(11): Alpha-Me S5-pentenyl-alanine olefin amino acid connected by an all-carbon crosslinker comprising one double bond
  C-term NH2
LTFAAYWSQLAS

SEQ ID NO: 1454 - protein, 12 aa, Artificial Sequence
  Description of Artificial Sequence: Synthetic peptide
  N-term Ac
  MOD_RES (4)..(4): Alpha-Me R8-octenyl-alanine olefin amino acid connected by an all-carbon crosslinker comprising one double bond
  misc_feature (4)..(11): Crosslink between residues
  MOD_RES (11)..(11): Alpha-Me S5-pentenyl-alanine olefin amino acid connected by an all-carbon crosslinker comprising one double bond
  C-term NH2
ETFAAYWAQLAS

SEQ ID NO: 1455 - protein, 12 aa, Artificial Sequence
  Description of Artificial Sequence: Synthetic peptide
  N-term Ac
  MOD_RES (4)..(4): Alpha-Me R8-octenyl-alanine olefin amino acid connected by an all-carbon crosslinker comprising one double bond
  misc_feature (4)..(11): Crosslink between residues
  MOD_RES (11)..(11): Alpha-Me S5-pentenyl-alanine olefin amino acid connected by an all-carbon crosslinker comprising one double bond
  C-term NH2
LTFAEYWAQLAS

SEQ ID NO: 1456 - protein, 12 aa, Artificial Sequence
  Description of Artificial Sequence: Synthetic peptide
  N-term Ac
  MOD_RES (4)..(4): Alpha-Me R8-octenyl-alanine olefin amino acid connected by an all-carbon crosslinker comprising one double bond
  misc_feature (4)..(11): Crosslink between residues
  MOD_RES (11)..(11): Alpha-Me S5-pentenyl-alanine olefin amino acid connected by an all-carbon crosslinker comprising one double bond
  C-term NHAm
LTFAHYWAQLAS

SEQ ID NO: 1457 - protein, 12 aa, Artificial Sequence
  Description of Artificial Sequence: Synthetic peptide
  N-term Ac
  MOD_RES (4)..(4): Alpha-Me R8-octenyl-alanine olefin amino acid connected by an all-carbon crosslinker comprising one double bond
  misc_feature (4)..(11): Crosslink between residues
  MOD_RES (11)..(11): Alpha-Me S5-pentenyl-alanine olefin amino acid connected by an all-carbon crosslinker comprising one double bond
  C-term NHiAm
LTFAHYWAQLAS

SEQ ID NO: 1458 - protein, 12 aa, Artificial Sequence
  Description of Artificial Sequence: Synthetic peptide
  N-term Ac
  MOD_RES (4)..(4): Alpha-Me R8-octenyl-alanine olefin amino acid connected by an all-carbon crosslinker comprising one double bond
  misc_feature (4)..(11): Crosslink between residues
  MOD_RES (11)..(11): Alpha-Me S5-pentenyl-alanine olefin amino acid connected by an all-carbon crosslinker comprising one double bond
  C-term NHnPr3Ph
LTFAHYWAQLAS

SEQ ID NO: 1459 - protein, 12 aa, Artificial Sequence
  Description of Artificial Sequence: Synthetic peptide
  N-term Ac
  MOD_RES (4)..(4): Alpha-Me R8-octenyl-alanine olefin amino acid connected by an all-carbon crosslinker comprising one double bond
  misc_feature (4)..(11): Crosslink between residues
  MOD_RES (11)..(11): Alpha-Me S5-pentenyl-alanine olefin amino acid connected by an all-carbon crosslinker comprising one double bond
  C-term NHnBu3,3Me
LTFAHYWAQLAS

SEQ ID NO: 1460 - protein, 12 aa, Artificial Sequence
  Description of Artificial Sequence: Synthetic peptide
  N-term Ac
  MOD_RES (4)..(4): Alpha-Me R8-octenyl-alanine olefin amino acid connected by an all-carbon crosslinker comprising one double bond
  misc_feature (4)..(11): Crosslink between residues
  MOD_RES (11)..(11): Alpha-Me S5-pentenyl-alanine olefin amino acid connected by an all-carbon crosslinker comprising one double bond
  C-term NHnBu
LTFAHYWAQLAS

SEQ ID NO: 1461 - protein, 12 aa, Artificial Sequence
  Description of Artificial Sequence: Synthetic peptide
  N-term Ac
  MOD_RES (4)..(4): Alpha-Me R8-octenyl-alanine olefin amino acid connected by an all-carbon crosslinker comprising one double bond
  misc_feature (4)..(11): Crosslink between residues
  MOD_RES (11)..(11): Alpha-Me S5-pentenyl-alanine olefin amino acid connected by an all-carbon crosslinker comprising one double bond
  C-term NHnPr
LTFAHYWAQLAS

SEQ ID NO: 1462 - protein, 12 aa, Artificial Sequence
  Description of Artificial Sequence: Synthetic peptide
  N-term Ac
  MOD_RES (4)..(4): Alpha-Me R8-octenyl-alanine olefin amino acid connected by an all-carbon crosslinker comprising one double bond
  misc_feature (4)..(11): Crosslink between residues
  MOD_RES (11)..(11): Alpha-Me S5-pentenyl-alanine olefin amino acid connected by an all-carbon crosslinker comprising one double bond
  C-term NHnEt2Ch
LTFAHYWAQLAS

SEQ ID NO: 1463 - protein, 12 aa, Artificial Sequence
  Description of Artificial Sequence: Synthetic peptide
  N-term Ac
  MOD_RES (4)..(4): Alpha-Me R8-octenyl-alanine olefin amino acid connected by an all-carbon crosslinker comprising one double bond
  misc_feature (4)..(11): Crosslink between residues
  MOD_RES (11)..(11): Alpha-Me S5-pentenyl-alanine olefin amino acid connected by an all-carbon crosslinker comprising one double bond
  C-term NHHex
LTFAHYWAQLAS

SEQ ID NO: 1464 - protein, 12 aa, Artificial Sequence
  Description of Artificial Sequence: Synthetic peptide
  N-term Ac
  MOD_RES (4)..(4): Alpha-Me R8-octenyl-alanine olefin amino acid connected by an all-carbon crosslinker comprising one double bond
  misc_feature (4)..(11): Crosslink between residues
  MOD_RES (11)..(11): Alpha-Me S5-pentenyl-alanine olefin amino acid connected by an all-carbon crosslinker comprising one double bond
  C-term NHmdPeg2
LTFAAYWAQLAS

SEQ ID NO: 1465 - protein, 12 aa, Artificial Sequence
  Description of Artificial Sequence: Synthetic peptide
  N-term Ac
  MOD_RES (4)..(4): Alpha-Me R8-octenyl-alanine olefin amino acid connected by an all-carbon crosslinker comprising one double bond
  misc_feature (4)..(11): Crosslink between residues
  MOD_RES (11)..(11): Alpha-Me S5-pentenyl-alanine olefin amino acid connected by an all-carbon crosslinker comprising one double bond
  C-term NHmdPeg2
LTFAAYWAQLAA

SEQ ID NO: 1466 - protein, 12 aa, Artificial Sequence
  Description of Artificial Sequence: Synthetic peptide
  N-term Ac
  MOD_RES (4)..(4): Alpha-Me R5-pentenyl-alanine olefin amino acid connected by an all-carbon crosslinker comprising one double bond
  misc_feature (4)..(11): Crosslink between residues
  MOD_RES (11)..(11): Alpha-Me S8-octenyl-alanine olefin amino acid connected by an all-carbon crosslinker comprising one double bond
  C-term NH2
LTFAAYWAALAS

SEQ ID NO: 1467 - protein, 12 aa, Artificial Sequence
  Description of Artificial Sequence: Synthetic peptide
  N-term Ac
  MOD_RES (4)..(4): Alpha-Me R8-octenyl-alanine olefin amino acid connected by an all-carbon crosslinker comprising one double bond
  misc_feature (4)..(11): Crosslink between residues
  MOD_RES (8)..(8): Cou
  MOD_RES (11)..(11): Alpha-Me S5-pentenyl-alanine olefin amino acid connected by an all-carbon crosslinker comprising one double bond
  C-term NH2
LTFAAYWXQLAS

SEQ ID NO: 1468 - protein, 12 aa, Artificial Sequence
  Description of Artificial Sequence: Synthetic peptide
  N-term Ac
  MOD_RES (4)..(4): Alpha-Me R8-octenyl-alanine olefin amino acid connected by an all-carbon crosslinker comprising one double bond
  misc_feature (4)..(11): Crosslink between residues
  MOD_RES (5)..(5): Cou
  MOD_RES (11)..(11): Alpha-Me S5-pentenyl-alanine olefin amino acid connected by an all-carbon crosslinker comprising one double bond
  C-term NH2
LTFAXYWAQLAS

SEQ ID NO: 1469 - protein, 12 aa, Artificial Sequence
  Description of Artificial Sequence: Synthetic peptide
  N-term Ac
  MOD_RES (1)..(1): Cou
  MOD_RES (4)..(4): Alpha-Me R8-octenyl-alanine olefin amino acid connected by an all-carbon crosslinker comprising one double bond
  misc_feature (4)..(11): Crosslink between residues
  MOD_RES (11)..(11): Alpha-Me S5-pentenyl-alanine olefin amino acid connected by an all-carbon crosslinker comprising one double bond
  C-term NH2
XTFAAYWAQLAS

SEQ ID NO: 1470 - protein, 12 aa, Artificial Sequence
  Description of Artificial Sequence: Synthetic peptide
  N-term H
  MOD_RES (4)..(4): Alpha-Me R8-octenyl-alanine olefin amino acid connected by an all-carbon crosslinker comprising one double bond
  misc_feature (4)..(11): Crosslink between residues
  MOD_RES (11)..(11): Alpha-Me S5-pentenyl-alanine olefin amino acid connected by an all-carbon crosslinker comprising one double bond
  C-term NH2
LTFAAYWAQLAA

SEQ ID NO: 1471 - protein, 12 aa, Artificial Sequence
  Description of Artificial Sequence: Synthetic peptide
  N-term Ac
  MOD_RES (4)..(4): Alpha-Me R8-octenyl-alanine olefin amino acid connected by an all-carbon crosslinker comprising one double bond
  misc_feature (4)..(11): Crosslink between residues
  MOD_RES (11)..(11): Alpha-Me S5-pentenyl-alanine olefin amino acid connected by an all-carbon crosslinker comprising one double bond
  C-term NH2
HHFAAYWAQLAS

SEQ ID NO: 1472 - protein, 12 aa, Artificial Sequence
  Description of Artificial Sequence: Synthetic peptide
  N-term Ac
  MOD_RES (3)..(3): 2-Naphthalanine
  MOD_RES (4)..(4): Alpha-Me R8-octenyl-alanine olefin amino acid connected by an all-carbon crosslinker comprising one double bond
  misc_feature (4)..(11): Crosslink between residues
  MOD_RES (11)..(11): Alpha-Me S5-pentenyl-alanine olefin amino acid connected by an all-carbon crosslinker comprising one double bond
  C-term NH2
LTAAAYWSQLAS

SEQ ID NO: 1473 - protein, 12 aa, Artificial Sequence
  Description of Artificial Sequence: Synthetic peptide
  N-term Ac
  MOD_RES (4)..(4): Alpha-Me R8-octenyl-alanine olefin amino acid connected by an all-carbon crosslinker comprising one double bond
  misc_feature (4)..(11): Crosslink between residues
  MOD_RES (6)..(6): Cou
  MOD_RES (11)..(11): Alpha-Me S5-pentenyl-alanine olefin amino acid connected by an all-carbon crosslinker comprising one double bond
  C-term NH2
LTFAHXWAQLAS

SEQ ID NO: 1474 - protein, 12 aa, Artificial Sequence
  Description of Artificial Sequence: Synthetic peptide
  N-term Ac
  MOD_RES (4)..(4): Alpha-Me R8-octenyl-alanine olefin amino acid connected by an all-carbon crosslinker comprising one double bond
  misc_feature (4)..(11): Crosslink between residues
  MOD_RES (8)..(8): Cou2
  MOD_RES (11)..(11): Alpha-Me S5-pentenyl-alanine olefin amino acid connected by an all-carbon crosslinker comprising one double bond
  C-term NH2
LTFAAYWXQLAS

SEQ ID NO: 1475 - protein, 12 aa, Artificial Sequence
  Description of Artificial Sequence: Synthetic peptide
  N-term Ac
  MOD_RES (4)..(4): Alpha-Me R8-octenyl-alanine olefin amino acid connected by an all-carbon crosslinker comprising one double bond
  misc_feature (4)..(11): Crosslink between residues
  MOD_RES (5)..(5): Cou2
  MOD_RES (11)..(11): Alpha-Me S5-pentenyl-alanine olefin amino acid connected by an all-carbon crosslinker comprising one double bond
  C-term NH2
LTFAXYWAQLAS

SEQ ID NO: 1476 - protein, 12 aa, Artificial Sequence
  Description of Artificial Sequence: Synthetic peptide
  N-term Ac
  MOD_RES (1)..(1): Cou2
  MOD_RES (4)..(4): Alpha-Me R8-octenyl-alanine olefin amino acid connected by an all-carbon crosslinker comprising one double bond
  misc_feature (4)..(11): Crosslink between residues
  MOD_RES (11)..(11): Alpha-Me S5-pentenyl-alanine olefin amino acid connected by an all-carbon crosslinker comprising one double bond
  C-term NH2
XTFAAYWAQLAS

SEQ ID NO: 1477 - protein, 12 aa, Artificial Sequence
  Description of Artificial Sequence: Synthetic peptide
  N-term Ac
  MOD_RES (4)..(4): Alpha-Me R8-octenyl-alanine olefin amino acid connected by an all-carbon crosslinker comprising one double bond
  misc_feature (4)..(11): Crosslink between residues
  MOD_RES (6)..(6): Cou2
  MOD_RES (11)..(11): Alpha-Me S5-pentenyl-alanine olefin amino acid connected by an all-carbon crosslinker comprising one double bond
  C-term NH2
LTFAAXWAQLAS

SEQ ID NO: 1478 - protein, 12 aa, Artificial Sequence
  Description of Artificial Sequence: Synthetic peptide
  N-term Dmaac
  MOD_RES (4)..(4): Alpha-Me R8-octenyl-alanine olefin amino acid connected by an all-carbon crosslinker comprising one double bond
  misc_feature (4)..(11): Crosslink between residues
  MOD_RES (11)..(11): Alpha-Me S5-pentenyl-alanine olefin amino acid connected by an all-carbon crosslinker comprising one double bond
  C-term NH2
LTFAAYWAQLAS

SEQ ID NO: 1479 - protein, 12 aa, Artificial Sequence
  Description of Artificial Sequence: Synthetic peptide
  N-term Hexac
  MOD_RES (4)..(4): Alpha-Me R8-octenyl-alanine olefin amino acid connected by an all-carbon crosslinker comprising one double bond
  misc_feature (4)..(11): Crosslink between residues
  MOD_RES (11)..(11): Alpha-Me S5-pentenyl-alanine olefin amino acid connected by an all-carbon crosslinker comprising one double bond
  C-term NH2
LTFAAYWAQLAS

SEQ ID NO: 1480 - protein, 12 aa, Artificial Sequence
  Description of Artificial Sequence: Synthetic peptide
  N-term Napac
  MOD_RES (4)..(4): Alpha-Me R8-octenyl-alanine olefin amino acid connected by an all-carbon crosslinker comprising one double bond
  misc_feature (4)..(11): Crosslink between residues
  MOD_RES (11)..(11): Alpha-Me S5-pentenyl-alanine olefin amino acid connected by an all-carbon crosslinker comprising one double bond
  C-term NH2
LTFAAYWAQLAS

SEQ ID NO: 1481 - protein, 12 aa, Artificial Sequence
  Description of Artificial Sequence: Synthetic peptide
  N-term Pam
  MOD_RES (4)..(4): Alpha-Me R8-octenyl-alanine olefin amino acid connected by an all-carbon crosslinker comprising one double bond
  misc_feature (4)..(11): Crosslink between residues
  MOD_RES (11)..(11): Alpha-Me S5-pentenyl-alanine olefin amino acid connected by an all-carbon crosslinker comprising one double bond
  C-term NH2
LTFAAYWAQLAS

SEQ ID NO: 1482 - protein, 12 aa, Artificial Sequence
  Description of Artificial Sequence: Synthetic peptide
  N-term Ac
  MOD_RES (3)..(3): 2-Naphthalanine
  MOD_RES (4)..(4): Alpha-Me R8-octenyl-alanine olefin amino acid connected by an all-carbon crosslinker comprising one double bond
  misc_feature (4)..(11): Crosslink between residues
  MOD_RES (11)..(11): Alpha-Me S5-pentenyl-alanine olefin amino acid connected by an all-carbon crosslinker comprising one double bond
  C-term NH2
LTAAHYAAQLAS

SEQ ID NO: 1483 - protein, 12 aa, Artificial Sequence
  Description of Artificial Sequence: Synthetic peptide
  N-term Ac
  MOD_RES (3)..(3): 2-Naphthalanine
  MOD_RES (4)..(4): Alpha-Me R8-octenyl-alanine olefin amino acid that is not connected by a crosslinker
  MOD_RES (11)..(11): Alpha-Me S5-pentenyl-alanine olefin amino acid that is not connected by a crosslinker
  C-term NH2
LTAAHYWAQLAS

SEQ ID NO: 1484 - protein, 12 aa, Artificial Sequence
  Description of Artificial Sequence: Synthetic peptide
  N-term Ac
  MOD_RES (3)..(3): 2-Naphthalanine
  MOD_RES (4)..(4): Alpha-Me R8-octenyl-alanine olefin amino acid connected by an all-carbon crosslinker comprising one double bond
  misc_feature (4)..(11): Crosslink between residues
  MOD_RES (11)..(11): Alpha-Me S5-pentenyl-alanine olefin amino acid connected by an all-carbon crosslinker comprising one double bond
  C-term NH2
LTAAHYFAQLAS

SEQ ID NO: 1485 - protein, 12 aa, Artificial Sequence
  Description of Artificial Sequence: Synthetic peptide
  N-term Ac
  MOD_RES (3)..(3): 2-Naphthalanine
  MOD_RES (4)..(4): Alpha-Me R8-octenyl-alanine olefin amino acid connected by an all-carbon crosslinker comprising one double bond
  misc_feature (4)..(11): Crosslink between residues
  MOD_RES (11)..(11): Alpha-Me S5-pentenyl-alanine olefin amino acid connected by an all-carbon crosslinker comprising one double bond
  C-term NH2
LTAAHWAAQLAS

SEQ ID NO: 1486 - protein, 12 aa, Artificial Sequence
  Description of Artificial Sequence: Synthetic peptide
  N-term Ac
  MOD_RES (3)..(3): 2-Naphthalanine
  MOD_RES (4)..(4): Alpha-Me R8-octenyl-alanine olefin amino acid connected by an all-carbon crosslinker comprising one double bond
  misc_feature (4)..(11): Crosslink between residues
  MOD_RES (11)..(11): Alpha-Me S5-pentenyl-alanine olefin amino acid connected by an all-carbon crosslinker comprising one double bond
  C-term NH2
LTAAHYAWQLAS

SEQ ID NO: 1487 - protein, 12 aa, Artificial Sequence
  Description of Artificial Sequence: Synthetic peptide
  N-term Ac
  MOD_RES (3)..(3): 2-Naphthalanine
  MOD_RES (4)..(4): Alpha-Me R8-octenyl-alanine olefin amino acid connected by an all-carbon crosslinker comprising one double bond
  misc_feature (4)..(11): Crosslink between residues
  MOD_RES (11)..(11): Alpha-Me S5-pentenyl-alanine olefin amino acid connected by an all-carbon crosslinker comprising one double bond
  C-term NH2
LTAAHYAAQWAS

SEQ ID NO: 1488 - protein, 12 aa, Artificial Sequence
  Description of Artificial Sequence: Synthetic peptide
  N-term Ac
  MOD_RES (4)..(4): Alpha-Me R8-octenyl-alanine olefin amino acid connected by an all-carbon crosslinker comprising one double bond
  misc_feature (4)..(11): Crosslink between residues
  MOD_RES (11)..(11): Alpha-Me S5-pentenyl-alanine olefin amino acid connected by an all-carbon crosslinker comprising one double bond
  C-term NH2
LTWAHYWAQLAS

SEQ ID NO: 1489 - protein, 12 aa, Artificial Sequence
  Description of Artificial Sequence: Synthetic peptide
  N-term Ac
  MOD_RES (3)..(3): 1-Naphthalanine
  MOD_RES (4)..(4): Alpha-Me R8-octenyl-alanine olefin amino acid connected by an all-carbon crosslinker comprising one double bond
  misc_feature (4)..(11): Crosslink between residues
  MOD_RES (11)..(11): Alpha-Me S5-pentenyl-alanine olefin amino acid connected by an all-carbon crosslinker comprising one double bond
  C-term NH2
LTAAHYWAQLAS

SEQ ID NO: 1490 - protein, 12 aa, Artificial Sequence
  Description of Artificial Sequence: Synthetic peptide
  N-term Ac
  MOD_RES (1)..(12): D-amino acid
  C-term NH2
TAWYANFEKLLR

SEQ ID NO: 1491 - protein, 12 aa, Artificial Sequence
  Description of Artificial Sequence: Synthetic peptide
  N-term Ac
  MOD_RES (1)..(6): D-amino acid
  MOD_RES (7)..(7): D-Phe-4CF3
  MOD_RES (8)..(12): D-amino acid
  C-term NH2
TAWYANFEKLLR

SEQ ID NO: 1492 - protein, 12 aa, Artificial Sequence
  Description of Artificial Sequence: Synthetic peptide
  N-term Ac
  MOD_RES (2)..(2): Alpha-Me R-azide 1,4 triazole (6 carbon) alanine olefin amino acid connected by an all-carbon crosslinker comprising one double bond
  misc_feature (2)..(9): Crosslink between residues
  MOD_RES (7)..(7): Ac3c
  MOD_RES (9)..(9): Alpha-Me alkyne 1,4 triazole (5 carbon) alanine olefin amino acid connected by an all-carbon crosslinker comprising one double bond
  C-term NH2
FAAYWEXLAAAA

SEQ ID NO: 1493 - protein, 12 aa, Artificial Sequence
  Description of Artificial Sequence: Synthetic peptide
  N-term Ac
  MOD_RES (2)..(2): Alpha-Me R-azide 1,4 triazole (6 carbon) alanine olefin amino acid connected by an all-carbon crosslinker comprising one double bond
  misc_feature (2)..(9): Crosslink between residues
  MOD_RES (7)..(7): Ac3c
  MOD_RES (9)..(9): Alpha-Me alkyne 1,4 triazole (5 carbon) alanine olefin amino acid connected by an all-carbon crosslinker comprising one double bond
  MOD_RES (11)..(11): 2-aminoisobutyric acid
  C-term NH2
FAAYWEXLAAXA

SEQ ID NO: 1494 - protein, 14 aa, Artificial Sequence
  Description of Artificial Sequence: Synthetic peptide
  N-term Ac
  MOD_RES (4)..(4): Alpha-Me R-azide 1,4 triazole (6 carbon) alanine olefin amino acid connected by an all-carbon crosslinker comprising one double bond
  misc_feature (4)..(11): Crosslink between residues
  MOD_RES (11)..(11): Alpha-Me alkyne 1,4 triazole (5 carbon) alanine olefin amino acid connected by an all-carbon crosslinker comprising one double bond
  MOD_RES (14)..(14): Norleucine
  C-term NH2
LTFAAYWAQLASAL

SEQ ID NO: 1495 - protein, 14 aa, Artificial Sequence
  Description of Artificial Sequence: Synthetic peptide
  N-term Ac
  MOD_RES (4)..(4): Alpha-Me R-azide 1,4 triazole (6 carbon) alanine olefin amino acid connected by an all-carbon crosslinker comprising one double bond
  misc_feature (4)..(11): Crosslink between residues
  MOD_RES (11)..(11): Alpha-Me alkyne 1,4 triazole (5 carbon) alanine olefin amino acid connected by an all-carbon crosslinker comprising one double bond
  C-term NH2
LTFAAYWAQLASAL

SEQ ID NO: 1496 - protein, 14 aa, Artificial Sequence
  Description of Artificial Sequence: Synthetic peptide
  N-term Ac
  MOD_RES (4)..(4): Alpha-Me R-azide 1,4 triazole (6 carbon) alanine olefin amino acid connected by an all-carbon crosslinker comprising one double bond
  misc_feature (4)..(11): Crosslink between residues
  MOD_RES (11)..(11): Alpha-Me alkyne 1,4 triazole (5 carbon) alanine olefin amino acid connected by an all-carbon crosslinker comprising one double bond
  C-term NH2
LTFAAYWAQLASAM

SEQ ID NO: 1497 - protein, 14 aa, Artificial Sequence
  Description of Artificial Sequence: Synthetic peptide
  N-term Ac
  MOD_RES (4)..(4): Alpha-Me R-azide 1,4 triazole (6 carbon) alanine olefin amino acid connected by an all-carbon crosslinker comprising one double bond
  misc_feature (4)..(11): Crosslink between residues
  MOD_RES (11)..(11): Alpha-Me alkyne 1,4 triazole (5 carbon) alanine olefin amino acid connected by an all-carbon crosslinker comprising one double bond
  MOD_RES (14)..(14): homo-Leu
  C-term NH2
LTFAAYWAQLASAL

SEQ ID NO: 1498 - protein, 14 aa, Artificial Sequence
  Description of Artificial Sequence: Synthetic peptide
  N-term Ac
  MOD_RES (4)..(4): Alpha-Me R-azide 1,4 triazole (6 carbon) alanine olefin amino acid connected by an all-carbon crosslinker comprising one double bond
  misc_feature (4)..(11): Crosslink between residues
  MOD_RES (11)..(11): Alpha-Me alkyne 1,4 triazole (5 carbon) alanine olefin amino acid connected by an all-carbon crosslinker comprising one double bond
  C-term NH2
LTFAAYWAQLASAF

SEQ ID NO: 1499 - protein, 14 aa, Artificial Sequence
  Description of Artificial Sequence: Synthetic peptide
  N-term Ac
  MOD_RES (4)..(4): Alpha-Me R-azide 1,4 triazole (6 carbon) alanine olefin amino acid connected by an all-carbon crosslinker comprising one double bond
  misc_feature (4)..(11): Crosslink between residues
  MOD_RES (11)..(11): Alpha-Me alkyne 1,4 triazole (5 carbon) alanine olefin amino acid connected by an all-carbon crosslinker comprising one double bond
  C-term NH2
LTFAAYWAQLASAI

SEQ ID NO: 1500 - protein, 14 aa, Artificial Sequence
  Description of Artificial Sequence: Synthetic peptide
  N-term Ac
  MOD_RES (4)..(4): Alpha-Me R-azide 1,4 triazole (6 carbon) alanine olefin amino acid connected by an all-carbon crosslinker comprising one double bond
  misc_feature (4)..(11): Crosslink between residues
  MOD_RES (11)..(11): Alpha-Me alkyne 1,4 triazole (5 carbon) alanine olefin amino acid connected by an all-carbon crosslinker comprising one double bond
  MOD_RES (14)..(14): Cyclohexyl-Gly
  C-term NH2
LTFAAYWAQLASAG

SEQ ID NO: 1501 - protein, 14 aa, Artificial Sequence
  Description of Artificial Sequence: Synthetic peptide
  N-term Ac
  MOD_RES (4)..(4): Alpha-Me R-azide 1,4 triazole (6 carbon) alanine olefin amino acid connected by an all-carbon crosslinker comprising one double bond
  misc_feature (4)..(11): Crosslink between residues
  MOD_RES (11)..(11): Alpha-Me alkyne 1,4 triazole (5 carbon) alanine olefin amino acid connected by an all-carbon crosslinker comprising one double bond
  MOD_RES (14)..(14): 2-aminoisobutyric acid
  C-term NH2
LTFAAYWAQLASAX

SEQ ID NO: 1502 - protein, 14 aa, Artificial Sequence
  Description of Artificial Sequence: Synthetic peptide
  N-term Ac
  MOD_RES (4)..(4): Alpha-Me R-azide 1,4 triazole (6 carbon) alanine olefin amino acid connected by an all-carbon crosslinker comprising one double bond
  misc_feature (4)..(11): Crosslink between residues
  MOD_RES (11)..(11): Alpha-Me alkyne 1,4 triazole (5 carbon) alanine olefin amino acid connected by an all-carbon crosslinker comprising one double bond
  C-term NH2
LTFAAYWAQLASAA

SEQ ID NO: 1503 - protein, 14 aa, Artificial Sequence
  Description of Artificial Sequence: Synthetic peptide
  N-term Ac
  MOD_RES (4)..(4): Alpha-Me R-azide 1,4 triazole (6 carbon) alanine olefin amino acid connected by an all-carbon crosslinker comprising one double bond
  misc_feature (4)..(9): Crosslink between residues
  MOD_RES (9)..(9): Alpha-Me alkyne 1,4 triazole (5 carbon) alanine olefin amino acid connected by an all-carbon crosslinker comprising one double bond
  MOD_RES (11)..(11): Alpha-Me S5-pentenyl-alanine olefin amino acid connected by an all-carbon crosslinker comprising one double bond
  misc_feature (11)..(13): Crosslink between residues
  MOD_RES (13)..(13): Alpha-Me S5-pentenyl-alanine olefin amino acid connected by an all-carbon crosslinker comprising one double bond
  MOD_RES (14)..(14): Norleucine
  C-term NH2
LTFAAYWAALASAL

SEQ ID NO: 1504 - protein, 14 aa, Artificial Sequence
  Description of Artificial Sequence: Synthetic peptide
  N-term Ac
  MOD_RES (4)..(4): Alpha-Me R-azide 1,4 triazole (6 carbon) alanine olefin amino acid connected by an all-carbon crosslinker comprising one double bond
  misc_feature (4)..(9): Crosslink between residues
  MOD_RES (9)..(9): Alpha-Me alkyne 1,4 triazole (5 carbon) alanine olefin amino acid connected by an all-carbon crosslinker comprising one double bond
  MOD_RES (11)..(11): Alpha-Me S5-pentenyl-alanine olefin amino acid connected by an all-carbon crosslinker comprising one double bond
  misc_feature (11)..(13): Crosslink between residues
  MOD_RES (13)..(13): Alpha-Me S5-pentenyl-alanine olefin amino acid connected by an all-carbon crosslinker comprising one double bond
  C-term NH2
LTFAAYWAALASAA

SEQ ID NO: 1505 - protein, 12 aa, Artificial Sequence
  Description of Artificial Sequence: Synthetic peptide
  N-term Ac
  MOD_RES (2)..(2): Alpha-Me R-azide 1,4 triazole (6 carbon) alanine olefin amino acid connected by an all-carbon crosslinker comprising one double bond
  misc_feature (2)..(9): Crosslink between residues
  MOD_RES (7)..(7): Ac3c
  MOD_RES (9)..(9): Alpha-Me alkyne 1,4 triazole (5 carbon) alanine olefin amino acid connected by an all-carbon crosslinker comprising one double bond
  MOD_RES (12)..(12): Norleucine
  C-term NH2
FAAYWEXLAAAL

SEQ ID NO: 1506 - protein, 12 aa, Artificial Sequence
  Description of Artificial Sequence: Synthetic peptide
  N-term Ac
  MOD_RES (2)..(2): Alpha-Me R-azide 1,4 triazole (6 carbon) alanine olefin amino acid connected by an all-carbon crosslinker comprising one double bond
  misc_feature (2)..(9): Crosslink between residues
  MOD_RES (7)..(7): Ac3c
  MOD_RES (9)..(9): Alpha-Me alkyne 1,4 triazole (5 carbon) alanine olefin amino acid connected by an all-carbon crosslinker comprising one double bond
  C-term NH2
FAAYWEXLAAAL

SEQ ID NO: 1507 - protein, 12 aa, Artificial Sequence
  Description of Artificial Sequence: Synthetic peptide
  N-term Ac
  MOD_RES (2)..(2): Alpha-Me R-azide 1,4 triazole (6 carbon) alanine olefin amino acid connected by an all-carbon crosslinker comprising one double bond
  misc_feature (2)..(9): Crosslink between residues
  MOD_RES (7)..(7): Ac3c
  MOD_RES (9)..(9): Alpha-Me alkyne 1,4 triazole (5 carbon) alanine olefin amino acid connected by an all-carbon crosslinker comprising one double bond
  C-term NH2
FAAYWEXLAAAM

SEQ ID NO: 1508 - protein, 12 aa, Artificial Sequence
  Description of Artificial Sequence: Synthetic peptide
  N-term Ac
  MOD_RES (2)..(2): Alpha-Me R-azide 1,4 triazole (6 carbon) alanine olefin amino acid connected by an all-carbon crosslinker comprising one double bond
  misc_feature (2)..(9): Crosslink between residues
  MOD_RES (7)..(7): Ac3c
  MOD_RES (9)..(9): Alpha-Me alkyne 1,4 triazole (5 carbon) alanine olefin amino acid connected by an all-carbon crosslinker comprising one double bond
  MOD_RES (12)..(12): homo-Leu
  C-term NH2
FAAYWEXLAAAL

SEQ ID NO: 1509 - protein, 12 aa, Artificial Sequence
  Description of Artificial Sequence: Synthetic peptide
  N-term Ac
  MOD_RES (2)..(2): Alpha-Me R-azide 1,4 triazole (6 carbon) alanine olefin amino acid connected by an all-carbon crosslinker comprising one double bond
  misc_feature (2)..(9): Crosslink between residues
  MOD_RES (7)..(7): Ac3c
  MOD_RES (9)..(9): Alpha-Me alkyne 1,4 triazole (5 carbon) alanine olefin amino acid connected by an all-carbon crosslinker comprising one double bond
  C-term NH2
FAAYWEXLAAAF

SEQ ID NO: 1510 - protein, 12 aa, Artificial Sequence
  Description of Artificial Sequence: Synthetic peptide
  N-term Ac
  MOD_RES (2)..(2): Alpha-Me R-azide 1,4 triazole (6 carbon) alanine olefin amino acid connected by an all-carbon crosslinker comprising one double bond
  misc_feature (2)..(9): Crosslink between residues
  MOD_RES (7)..(7): Ac3c
  MOD_RES (9)..(9): Alpha-Me alkyne 1,4 triazole (5 carbon) alanine olefin amino acid connected by an all-carbon crosslinker comprising one double bond
  C-term NH2
FAAYWEXLAAAI

SEQ ID NO: 1511 - protein, 12 aa, Artificial Sequence
  Description of Artificial Sequence: Synthetic peptide
  N-term Ac
  MOD_RES (2)..(2): Alpha-Me R-azide 1,4 triazole (6 carbon) alanine olefin amino acid connected by an all-carbon crosslinker comprising one double bond
  misc_feature (2)..(9): Crosslink between residues
  MOD_RES (7)..(7): Ac3c
  MOD_RES (9)..(9): Alpha-Me alkyne 1,4 triazole (5 carbon) alanine olefin amino acid connected by an all-carbon crosslinker comprising one double bond
  MOD_RES (12)..(12): Cyclohexyl-Gly
  C-term NH2
FAAYWEXLAAAG

SEQ ID NO: 1512 - protein, 12 aa, Artificial Sequence
  Description of Artificial Sequence: Synthetic peptide
  N-term Ac
  MOD_RES (2)..(2): Alpha-Me R-azide 1,4 triazole (6 carbon) alanine olefin amino acid connected by an all-carbon crosslinker comprising one double bond
  misc_feature (2)..(9): Crosslink between residues
  MOD_RES (7)..(7): Ac3c
  MOD_RES (9)..(9): Alpha-Me alkyne 1,4 triazole (5 carbon) alanine olefin amino acid connected by an all-carbon crosslinker comprising one double bond
  MOD_RES (12)..(12): Cyclohexyl-Ala
  C-term NH2
FAAYWEXLAAAA

SEQ ID NO: 1513 - protein, 12 aa, Artificial Sequence
  Description of Artificial Sequence: Synthetic peptide
  N-term Ac
  MOD_RES (2)..(2): Alpha-Me R-azide 1,4 triazole (6 carbon) alanine olefin amino acid connected by an all-carbon crosslinker comprising one double bond
  misc_feature (2)..(9): Crosslink between residues
  MOD_RES (7)..(7): Ac3c
  MOD_RES (9)..(9): Alpha-Me alkyne 1,4 triazole (5 carbon) alanine olefin amino acid connected by an all-carbon crosslinker comprising one double bond
  MOD_RES (12)..(12): 2-aminoisobutyric acid
  C-term NH2
FAAYWEXLAAAX

SEQ ID NO: 1514 - protein, 15 aa, Artificial Sequence
  Description of Artificial Sequence: Synthetic peptide
  N-term Ac
  MOD_RES (4)..(4): Alpha-Me R-azide 1,4 triazole (6 carbon) alanine olefin amino acid connected by an all-carbon crosslinker comprising one double bond
  misc_feature (4)..(11): Crosslink between residues
  MOD_RES (11)..(11): Alpha-Me alkyne 1,4 triazole (5 carbon) alanine olefin amino acid connected by an all-carbon crosslinker comprising one double bond
  MOD_RES (14)..(14): 2-aminoisobutyric acid
  C-term NH2
LTFAAYWAQLAAAXV

SEQ ID NO: 1515 - protein, 15 aa, Artificial Sequence
  Description of Artificial Sequence: Synthetic peptide
  N-term Ac
  MOD_RES (4)..(4): Alpha-Me R-azide 1,4 triazole (6 carbon) alanine olefin amino acid connected by an all-carbon crosslinker comprising one double bond
  misc_feature (4)..(11): Crosslink between residues
  MOD_RES (11)..(11): Alpha-Me alkyne 1,4 triazole (5 carbon) alanine olefin amino acid connected by an all-carbon crosslinker comprising one double bond
  MOD_RES (14)..(14): 2-aminoisobutyric acid
  C-term NH2
LTFAAYWAQLAAAXV

SEQ ID NO: 1516 - protein, 15 aa, Artificial Sequence
  Description of Artificial Sequence: Synthetic peptide
  N-term Ac
  MOD_RES (4)..(4): Alpha-Me R-azide 1,4 triazole (6 carbon) alanine olefin amino acid connected by an all-carbon crosslinker comprising one double bond
  misc_feature (4)..(11): Crosslink between residues
  MOD_RES (11)..(11): Alpha-Me alkyne 1,4 triazole (5 carbon) alanine olefin amino acid connected by an all-carbon crosslinker comprising one double bond
  MOD_RES (13)..(13): 2-aminoisobutyric acid
  C-term NH2
LTFAAYWAQLASXAA

SEQ ID NO: 1517 - protein, 15 aa, Artificial Sequence
  Description of Artificial Sequence: Synthetic peptide
  N-term Ac
  MOD_RES (4)..(4): Alpha-Me R-azide 1,4 triazole (6 carbon) alanine olefin amino acid connected by an all-carbon crosslinker comprising one double bond
  misc_feature (4)..(11): Crosslink between residues
  MOD_RES (11)..(11): Alpha-Me alkyne 1,4 triazole (5 carbon) alanine olefin amino acid connected by an all-carbon crosslinker comprising one double bond
  MOD_RES (13)..(13): 2-aminoisobutyric acid
  C-term NH2
LTFAAYWAQLASXAA

SEQ ID NO: 1518 - protein, 16 aa, Artificial Sequence
  Description of Artificial Sequence: Synthetic peptide
  N-term Ac
  MOD_RES (5)..(5): Alpha-Me R-azide 1,4 triazole (6 carbon) alanine olefin amino acid connected by an all-carbon crosslinker comprising one double bond
  misc_feature (5)..(12): Crosslink between residues
  MOD_RES (12)..(12): Alpha-Me alkyne 1,4 triazole (5 carbon) alanine olefin amino acid connected by an all-carbon crosslinker comprising one double bond
  MOD_RES (15)..(16): Norleucine
  C-term NH2
HLTFAHHWHQLAAALL

SEQ ID NO: 1519 - protein, 16 aa, Artificial Sequence
  Description of Artificial Sequence: Synthetic peptide
  N-term Ac
  MOD_RES (5)..(5): Alpha-Me R-azide 1,4 triazole (6 carbon) alanine olefin amino acid connected by an all-carbon crosslinker comprising one double bond
  misc_feature (5)..(12): Crosslink between residues
  MOD_RES (12)..(12): Alpha-Me alkyne 1,4 triazole (5 carbon) alanine olefin amino acid connected by an all-carbon crosslinker comprising one double bond
  C-term NH2
DLTFAHHWHQLARRLV

SEQ ID NO: 1520 - protein, 16 aa, Artificial Sequence
  Description of Artificial Sequence: Synthetic peptide
  N-term Ac
  MOD_RES (5)..(5): Alpha-Me R-azide 1,4 triazole (6 carbon) alanine olefin amino acid connected by an all-carbon crosslinker comprising one double bond
  misc_feature (5)..(12): Crosslink between residues
  MOD_RES (12)..(12): Alpha-Me alkyne 1,4 triazole (5 carbon) alanine olefin amino acid connected by an all-carbon crosslinker comprising one double bond
  C-term NH2
HHTFAHHWHQLAAAML

SEQ ID NO: 1521 - protein, 13 aa, Artificial Sequence
  Description of Artificial Sequence: Synthetic peptide
  N-term Ac
  MOD_RES (2)..(2): Alpha-Me R-azide 1,4 triazole (6 carbon) alanine olefin amino acid connected by an all-carbon crosslinker comprising one double bond
  misc_feature (2)..(9): Crosslink between residues
  MOD_RES (9)..(9): Alpha-Me alkyne 1,4 triazole (5 carbon) alanine olefin amino acid connected by an all-carbon crosslinker comprising one double bond
  MOD_RES (13)..(13): Cyclohexyl-Ala
  C-term NH2
FAHHWHQLARRDA

SEQ ID NO: 1522 - protein, 13 aa, Artificial Sequence
  Description of Artificial Sequence: Synthetic peptide
  N-term Ac
  MOD_RES (2)..(2): Alpha-Me R-azide 1,4 triazole (6 carbon) alanine olefin amino acid connected by an all-carbon crosslinker comprising one double bond
  misc_feature (2)..(9): Crosslink between residues
  MOD_RES (9)..(9): Alpha-Me alkyne 1,4 triazole (5 carbon) alanine olefin amino acid connected by an all-carbon crosslinker comprising one double bond
  C-term NH2
FAHHWHQLAHRFV

SEQ ID NO: 1523 - protein, 16 aa, Artificial Sequence
  Description of Artificial Sequence: Synthetic peptide
  N-term Ac
  MOD_RES (5)..(5): Alpha-Me R-azide 1,4 triazole (6 carbon) alanine olefin amino acid connected by an all-carbon crosslinker comprising one double bond
  misc_feature (5)..(12): Crosslink between residues
  MOD_RES (12)..(12): Alpha-Me alkyne 1,4 triazole (5 carbon) alanine olefin amino acid connected by an all-carbon crosslinker comprising one double bond
  MOD_RES (15)..(15): homo-Leu
  C-term NH2
HLTFAHHWHQLAAALA

SEQ ID NO: 1524 - protein, 16 aa, Artificial Sequence
  Description of Artificial Sequence: Synthetic peptide
  N-term Ac
  MOD_RES (5)..(5): Alpha-Me R-azide 1,4 triazole (6 carbon) alanine olefin amino acid connected by an all-carbon crosslinker comprising one double bond
  misc_feature (5)..(12): Crosslink between residues
  MOD_RES (12)..(12): Alpha-Me alkyne 1,4 triazole (5 carbon) alanine olefin amino acid connected by an all-carbon crosslinker comprising one double bond
  MOD_RES (15)..(15): Cyclohexyl-Gly
  MOD_RES (16)..(16): D-amino acid
  C-term NH2
DLTFAHHWHQLARRGL

SEQ ID NO: 1525 - protein, 16 aa, Artificial Sequence
  Description of Artificial Sequence: Synthetic peptide
  N-term Ac
  MOD_RES (5)..(5): Alpha-Me R-azide 1,4 triazole (6 carbon) alanine olefin amino acid connected by an all-carbon crosslinker comprising one double bond
  misc_feature (5)..(12): Crosslink between residues
  MOD_RES (12)..(12): Alpha-Me alkyne 1,4 triazole (5 carbon) alanine olefin amino acid connected by an all-carbon crosslinker comprising one double bond
  MOD_RES (15)..(15): Cyclohexyl-Gly
  MOD_RES (16)..(16): D-amino acid
  C-term NH2
DLTFAHHWHQLARRGL

SEQ ID NO: 1526 - protein, 16 aa, Artificial Sequence
  Description of Artificial Sequence: Synthetic peptide
  N-term Ac
  MOD_RES (5)..(5): Alpha-Me R-azide 1,4 triazole (6 carbon) alanine olefin amino acid connected by an all-carbon crosslinker comprising one double bond
  misc_feature (5)..(12): Crosslink between residues
  MOD_RES (12)..(12): Alpha-Me alkyne 1,4 triazole (5 carbon) alanine olefin amino acid connected by an all-carbon crosslinker comprising one double bond
  MOD_RES (15)..(15): Cyclohexyl-Ala
  MOD_RES (16)..(16): D-amino acid
  C-term NH2
HHTFAHHWHQLAAAAV

SEQ ID NO: 1527 - protein, 13 aa, Artificial Sequence
  Description of Artificial Sequence: Synthetic peptide
  N-term Ac
  MOD_RES (2)..(2): Alpha-Me R-azide 1,4 triazole (6 carbon) alanine olefin amino acid connected by an all-carbon crosslinker comprising one double bond
  misc_feature (2)..(9): Crosslink between residues
  MOD_RES (9)..(9): Alpha-Me alkyne 1,4 triazole (5 carbon) alanine olefin amino acid connected by an all-carbon crosslinker comprising one double bond
  MOD_RES (13)..(13): D-amino acid
  C-term NH2
FAHHWHQLARRDA

SEQ ID NO: 1528 - protein, 13 aa, Artificial Sequence
  Description of Artificial Sequence: Synthetic peptide
  N-term Ac
  MOD_RES (2)..(2): Alpha-Me R-azide 1,4 triazole (6 carbon) alanine olefin amino acid connected by an all-carbon crosslinker comprising one double bond
  misc_feature (2)..(9): Crosslink between residues
  MOD_RES (9)..(9): Alpha-Me alkyne 1,4 triazole (5 carbon) alanine olefin amino acid connected by an all-carbon crosslinker comprising one double bond
  MOD_RES (12)..(12): 2-aminoisobutyric acid
  C-term NH2
FAHHWHQLAHRXG

SEQ ID NO: 1529 - protein, 13 aa, Artificial Sequence
  Description of Artificial Sequence: Synthetic peptide
  N-term Ac
  MOD_RES (2)..(2): Alpha-Me R-azide 1,4 triazole (6 carbon) alanine olefin amino acid connected by an all-carbon crosslinker comprising one double bond
  misc_feature (2)..(9): Crosslink between residues
  MOD_RES (9)..(9): Alpha-Me alkyne 1,4 triazole (5 carbon) alanine olefin amino acid connected by an all-carbon crosslinker comprising one double bond
  MOD_RES (12)..(12): Norleucine
  C-term NH2
FAAYWAQLAHHLL

SEQ ID NO: 1530 - protein, 13 aa, Artificial Sequence
  Description of Artificial Sequence: Synthetic peptide
  N-term Ac
  MOD_RES (2)..(2): Alpha-Me R-azide 1,4 triazole (6 carbon) alanine olefin amino acid connected by an all-carbon crosslinker comprising one double bond
  misc_feature (2)..(9): Crosslink between residues
  MOD_RES (9)..(9): Alpha-Me alkyne 1,4 triazole (5 carbon) alanine olefin amino acid connected by an all-carbon crosslinker comprising one double bond
  MOD_RES (13)..(13): Norleucine
  C-term NH2
FAAYWSALAHQAL

SEQ ID NO: 1531 - protein, 13 aa, Artificial Sequence
  Description of Artificial Sequence: Synthetic peptide
  N-term Ac
  MOD_RES (2)..(2): Alpha-Me R-azide 1,4 triazole (6 carbon) alanine olefin amino acid connected by an all-carbon crosslinker comprising one double bond
  misc_feature (2)..(9): Crosslink between residues
  MOD_RES (9)..(9): Alpha-Me alkyne 1,4 triazole (5 carbon) alanine olefin amino acid connected by an all-carbon crosslinker comprising one double bond
  MOD_RES (12)..(12): Cyclohexyl-Gly
  MOD_RES (13)..(13): D-amino acid
  C-term NH2
FAAYWVQLAQHGL

SEQ ID NO: 1532 - protein, 13 aa, Artificial Sequence
  Description of Artificial Sequence: Synthetic peptide
  N-term Ac
  MOD_RES (2)..(2): Alpha-Me R-azide 1,4 triazole (6 carbon) alanine olefin amino acid connected by an all-carbon crosslinker comprising one double bond
  misc_feature (2)..(9): Crosslink between residues
  MOD_RES (9)..(9): Alpha-Me alkyne 1,4 triazole (5 carbon) alanine olefin amino acid connected by an all-carbon crosslinker comprising one double bond
  MOD_RES (12)..(12): Norleucine
  MOD_RES (13)..(13): D-amino acid
  C-term NH2
FAAYWTALAQQLV

SEQ ID NO: 1533 - protein, 13 aa, Artificial Sequence
  Description of Artificial Sequence: Synthetic peptide
  N-term Ac
  MOD_RES (2)..(2): Alpha-Me R-azide 1,4 triazole (6 carbon) alanine olefin amino acid connected by an all-carbon crosslinker comprising one double bond
  misc_feature (2)..(9): Crosslink between residues
  MOD_RES (9)..(9): Alpha-Me alkyne 1,4 triazole (5 carbon) alanine olefin amino acid connected by an all-carbon crosslinker comprising one double bond
  MOD_RES (11)..(11): 2-aminoisobutyric acid
  MOD_RES (13)..(13): D-amino acid
  C-term NH2
FAAYWYQLAHXAA

SEQ ID NO: 1534 - protein, 15 aa, Artificial Sequence
  Description of Artificial Sequence: Synthetic peptide
  N-term Ac
  MOD_RES (4)..(4): Alpha-Me R-azide 1,4 triazole (6 carbon) alanine olefin amino acid connected by an all-carbon crosslinker comprising one double bond
  misc_feature (4)..(11): Crosslink between residues
  MOD_RES (11)..(11): Alpha-Me alkyne 1,4 triazole (5 carbon) alanine olefin amino acid connected by an all-carbon crosslinker comprising one double bond
  MOD_RES (15)..(15): D-amino acid
  C-term NH2
LTFAAYWAQLAHHLA

SEQ ID NO: 1535 - protein, 15 aa, Artificial Sequence
  Description of Artificial Sequence: Synthetic peptide
  N-term Ac
  MOD_RES (4)..(4): Alpha-Me R-azide 1,4 triazole (6 carbon) alanine olefin amino acid connected by an all-carbon crosslinker comprising one double bond
  misc_feature (4)..(11): Crosslink between residues
  MOD_RES (11)..(11): Alpha-Me alkyne 1,4 triazole (5 carbon) alanine olefin amino acid connected by an all-carbon crosslinker comprising one double bond
  MOD_RES (15)..(15): D-amino acid
  C-term NH2
LTFAAYWAQLAHHLA

SEQ ID NO: 1536 - protein, 15 aa, Artificial Sequence
  Description of Artificial Sequence: Synthetic peptide
  N-term Ac
  MOD_RES (4)..(4): Alpha-Me R-azide 1,4 triazole (6 carbon) alanine olefin amino acid connected by an all-carbon crosslinker comprising one double bond
  misc_feature (4)..(11): Crosslink between residues
  MOD_RES (11)..(11): Alpha-Me alkyne 1,4 triazole (5 carbon) alanine olefin amino acid connected by an all-carbon crosslinker comprising one double bond
  MOD_RES (14)..(14): Norleucine
  MOD_RES (15)..(15): D-amino acid
  C-term NH2
LTFAAYWAQLAHQLV

SEQ ID NO: 1537 - protein, 15 aa, Artificial Sequence
  Description of Artificial Sequence: Synthetic peptide
  N-term Ac
  MOD_RES (4)..(4): Alpha-Me R-azide 1,4 triazole (6 carbon) alanine olefin amino acid connected by an all-carbon crosslinker comprising one double bond
  misc_feature (4)..(11): Crosslink between residues
  MOD_RES (11)..(11): Alpha-Me alkyne 1,4 triazole (5 carbon) alanine olefin amino acid connected by an all-carbon crosslinker comprising one double bond
  MOD_RES (14)..(14): Norleucine
  MOD_RES (15)..(15): D-amino acid
  C-term NH2
LTFAAYWAQLAHQLV

SEQ ID NO: 1538 - protein, 15 aa, Artificial Sequence
  Description of Artificial Sequence: Synthetic peptide
  N-term Ac
  MOD_RES (4)..(4): Alpha-Me R-azide 1,4 triazole (6 carbon) alanine olefin amino acid connected by an all-carbon crosslinker comprising one double bond
  misc_feature (4)..(11): Crosslink between residues
  MOD_RES (11)..(11): Alpha-Me alkyne 1,4 triazole (5 carbon) alanine olefin amino acid connected by an all-carbon crosslinker comprising one double bond
  MOD_RES (15)..(15): D-amino acid
  C-term NH2
LTFAAYWAQLAQQML

SEQ ID NO: 1539 - protein, 15 aa, Artificial Sequence
  Description of Artificial Sequence: Synthetic peptide
  N-term Ac
  MOD_RES (4)..(4): Alpha-Me R-azide 1,4 triazole (6 carbon) alanine olefin amino acid connected by an all-carbon crosslinker comprising one double bond
  misc_feature (4)..(11): Crosslink between residues
  MOD_RES (11)..(11): Alpha-Me alkyne 1,4 triazole (5 carbon) alanine olefin amino acid connected by an all-carbon crosslinker comprising one double bond
  MOD_RES (15)..(15): D-amino acid
  C-term NH2
LTFAAYWAQLAQQML

SEQ ID NO: 1540 - protein, 15 aa, Artificial Sequence
  Description of Artificial Sequence: Synthetic peptide
  N-term Ac
  MOD_RES (4)..(4): Alpha-Me R-azide 1,4 triazole (6 carbon) alanine olefin amino acid connected by an all-carbon crosslinker comprising one double bond
  misc_feature (4)..(11): Crosslink between residues
  MOD_RES (11)..(11): Alpha-Me alkyne 1,4 triazole (5 carbon) alanine olefin amino acid connected by an all-carbon crosslinker comprising one double bond
  MOD_RES (13)..(13): 2-aminoisobutyric acid
  MOD_RES (14)..(14): homo-Leu
  C-term NH2
LTFAAYWAQLAHXLV

SEQ ID NO: 1541 - protein, 15 aa, Artificial Sequence
  Description of Artificial Sequence: Synthetic peptide
  N-term Ac
  MOD_RES (4)..(4): Alpha-Me R-azide 1,4 triazole (6 carbon) alanine olefin amino acid connected by an all-carbon crosslinker comprising one double bond
  misc_feature (4)..(11): Crosslink between residues
  MOD_RES (11)..(11): Alpha-Me alkyne 1,4 triazole (5 carbon) alanine olefin amino acid connected by an all-carbon crosslinker comprising one double bond
  C-term NH2
LTFAAYWAQLAAHFA

SEQ ID NO: 1542 - protein, 16 aa, Artificial Sequence
  Description of Artificial Sequence: Synthetic peptide
  N-term Ac
  MOD_RES (5)..(5): Alpha-Me R-azide 1,4 triazole (6 carbon) alanine olefin amino acid connected by an all-carbon crosslinker comprising one double bond
  misc_feature (5)..(12): Crosslink between residues
  MOD_RES (12)..(12): Alpha-Me alkyne 1,4 triazole (5 carbon) alanine olefin amino acid connected by an all-carbon crosslinker comprising one double bond
  MOD_RES (15)..(15): Norleucine
  MOD_RES (16)..(16): D-amino acid
  C-term NH2
HLTFAHHWHQLAAALL

SEQ ID NO: 1543 - protein, 16 aa, Artificial Sequence
  Description of Artificial Sequence: Synthetic peptide
  N-term Ac
  MOD_RES (5)..(5): Alpha-Me R-azide 1,4 triazole (6 carbon) alanine olefin amino acid connected by an all-carbon crosslinker comprising one double bond
  misc_feature (5)..(12): Crosslink between residues
  MOD_RES (12)..(12): Alpha-Me alkyne 1,4 triazole (5 carbon) alanine olefin amino acid connected by an all-carbon crosslinker comprising one double bond
  MOD_RES (16)..(16): D-amino acid
  C-term NH2
DLTFAHHWHQLARRLA

SEQ ID NO: 1544 - protein, 16 aa, Artificial Sequence
  Description of Artificial Sequence: Synthetic peptide
  N-term Ac
  MOD_RES (5)..(5): Alpha-Me R-azide 1,4 triazole (6 carbon) alanine olefin amino acid connected by an all-carbon crosslinker comprising one double bond
  misc_feature (5)..(12): Crosslink between residues
  MOD_RES (12)..(12): Alpha-Me alkyne 1,4 triazole (5 carbon) alanine olefin amino acid connected by an all-carbon crosslinker comprising one double bond
  MOD_RES (16)..(16): D-amino acid
  C-term NH2
HHTFAHHWHQLAAAMV

SEQ ID NO: 1545 - protein, 13 aa, Artificial Sequence
  Description of Artificial Sequence: Synthetic peptide
  N-term Ac
  MOD_RES (2)..(2): Alpha-Me R-azide 1,4 triazole (6 carbon) alanine olefin amino acid connected by an all-carbon crosslinker comprising one double bond
  misc_feature (2)..(9): Crosslink between residues
  MOD_RES (9)..(9): Alpha-Me alkyne 1,4 triazole (5 carbon) alanine olefin amino acid connected by an all-carbon crosslinker comprising one double bond
  C-term NH2
FAHHWHQLARRDA

SEQ ID NO: 1546 - protein, 13 aa, Artificial Sequence
  Description of Artificial Sequence: Synthetic peptide
  N-term Ac
  MOD_RES (2)..(2): Alpha-Me R-azide 1,4 triazole (6 carbon) alanine olefin amino acid connected by an all-carbon crosslinker comprising one double bond
  misc_feature (2)..(9): Crosslink between residues
  MOD_RES (9)..(9): Alpha-Me alkyne 1,4 triazole (5 carbon) alanine olefin amino acid connected by an all-carbon crosslinker comprising one double bond
  MOD_RES (13)..(13): Cyclohexyl-Ala
  C-term NH2
FAHHWHQLAHRFA

SEQ ID NO: 1547 - protein, 11 aa, Artificial Sequence
  Description of Artificial Sequence: Synthetic peptide
  N-term Ac
  MOD_RES (2)..(2): Alpha-Me R-azide 1,4 triazole (6 carbon) alanine olefin amino acid connected by an all-carbon crosslinker comprising one double bond
  misc_feature (2)..(9): Crosslink between residues
  MOD_RES (9)..(9): Alpha-Me alkyne 1,4 triazole (5 carbon) alanine olefin amino acid connected by an all-carbon crosslinker comprising one double bond
  C-term NHAm
FAAYWEALAAA

SEQ ID NO: 1548 - protein, 11 aa, Artificial Sequence
  Description of Artificial Sequence: Synthetic peptide
  N-term Ac
  MOD_RES (2)..(2): Alpha-Me R-azide 1,4 triazole (6 carbon) alanine olefin amino acid connected by an all-carbon crosslinker comprising one double bond
  misc_feature (2)..(9): Crosslink between residues
  MOD_RES (9)..(9): Alpha-Me alkyne 1,4 triazole (5 carbon) alanine olefin amino acid connected by an all-carbon crosslinker comprising one double bond
  C-term NHiAm
FAAYWEALAAA

SEQ ID NO: 1549 - protein, 11 aa, Artificial Sequence
  Description of Artificial Sequence: Synthetic peptide
  N-term Ac
  MOD_RES (2)..(2): Alpha-Me R-azide 1,4 triazole (6 carbon) alanine olefin amino acid connected by an all-carbon crosslinker comprising one double bond
  misc_feature (2)..(9): Crosslink between residues
  MOD_RES (9)..(9): Alpha-Me alkyne 1,4 triazole (5 carbon) alanine olefin amino acid connected by an all-carbon crosslinker comprising one double bond
  C-term NHnPr3Ph
FAAYWEALAAA

SEQ ID NO: 1550 - protein, 11 aa, Artificial Sequence
  Description of Artificial Sequence: Synthetic peptide
  N-term Ac
  MOD_RES (2)..(2): Alpha-Me R-azide 1,4 triazole (6 carbon) alanine olefin amino acid connected by an all-carbon crosslinker comprising one double bond
  misc_feature (2)..(9): Crosslink between residues
  MOD_RES (9)..(9): Alpha-Me alkyne 1,4 triazole (5 carbon) alanine olefin amino acid connected by an all-carbon crosslinker comprising one double bond
  C-term NHnBu33Me
FAAYWEALAAA

SEQ ID NO: 1551 - protein, 11 aa, Artificial Sequence
  Description of Artificial Sequence: Synthetic peptide
  N-term Ac
  MOD_RES (2)..(2): Alpha-Me R-azide 1,4 triazole (6 carbon) alanine olefin amino acid connected by an all-carbon crosslinker comprising one double bond
  misc_feature (2)..(9): Crosslink between residues
  MOD_RES (9)..(9): Alpha-Me alkyne 1,4 triazole (5 carbon) alanine olefin amino acid connected by an all-carbon crosslinker comprising one double bond
  C-term NHnPr
FAAYWEALAAA

SEQ ID NO: 1552 - protein, 11 aa, Artificial Sequence
  Description of Artificial Sequence: Synthetic peptide
  N-term Ac
  MOD_RES (2)..(2): Alpha-Me R-azide 1,4 triazole (6 carbon) alanine olefin amino acid connected by an all-carbon crosslinker comprising one double bond
  misc_feature (2)..(9): Crosslink between residues
  MOD_RES (9)..(9): Alpha-Me alkyne 1,4 triazole (5 carbon) alanine olefin amino acid connected by an all-carbon crosslinker comprising one double bond
  C-term NHnEt2Ch
FAAYWEALAAA

SEQ ID NO: 1553 - protein, 11 aa, Artificial Sequence
  Description of Artificial Sequence: Synthetic peptide
  N-term Ac
  MOD_RES (2)..(2): Alpha-Me R-azide 1,4 triazole (6 carbon) alanine olefin amino acid connected by an all-carbon crosslinker comprising one double bond
  misc_feature (2)..(9): Crosslink between residues
  MOD_RES (9)..(9): Alpha-Me alkyne 1,4 triazole (5 carbon) alanine olefin amino acid connected by an all-carbon crosslinker comprising one double bond
  C-term NHnEt2Cp
FAAYWEALAAA

SEQ ID NO: 1554 - protein, 11 aa, Artificial Sequence
  Description of Artificial Sequence: Synthetic peptide
  N-term Ac
  MOD_RES (2)..(2): Alpha-Me R-azide 1,4 triazole (6 carbon) alanine olefin amino acid connected by an all-carbon crosslinker comprising one double bond
  misc_feature (2)..(9): Crosslink between residues
  MOD_RES (9)..(9): Alpha-Me alkyne 1,4 triazole (5 carbon) alanine olefin amino acid connected by an all-carbon crosslinker comprising one double bond
  C-term NHHex
FAAYWEALAAA

SEQ ID NO: 1555 - protein, 15 aa, Artificial Sequence
  Description of Artificial Sequence: Synthetic peptide
  N-term Ac
  MOD_RES (4)..(4): Alpha-Me R-azide 1,4 triazole (6 carbon) alanine olefin amino acid connected by an all-carbon crosslinker comprising one double bond
  misc_feature (4)..(11): Crosslink between residues
  MOD_RES (11)..(11): Alpha-Me alkyne 1,4 triazole (5 carbon) alanine olefin amino acid connected by an all-carbon crosslinker comprising one double bond
  C-term NH2
LTFAAYWAQLAAAIA

SEQ ID NO: 1556 - protein, 15 aa, Artificial Sequence
  Description of Artificial Sequence: Synthetic peptide
  N-term Ac
  MOD_RES (4)..(4): Alpha-Me R-azide 1,4 triazole (6 carbon) alanine olefin amino acid connected by an all-carbon crosslinker comprising one double bond
  misc_feature (4)..(11): Crosslink between residues
  MOD_RES (11)..(11): Alpha-Me alkyne 1,4 triazole (5 carbon) alanine olefin amino acid connected by an all-carbon crosslinker comprising one double bond
  C-term NH2
LTFAAYWAQLAAAIA

SEQ ID NO: 1557 - protein, 15 aa, Artificial Sequence
  Description of Artificial Sequence: Synthetic peptide
  N-term Ac
  MOD_RES (4)..(4): Alpha-Me R-azide 1,4 triazole (6 carbon) alanine olefin amino acid connected by an all-carbon crosslinker comprising one double bond
  misc_feature (4)..(11): Crosslink between residues
  MOD_RES (11)..(11): Alpha-Me alkyne 1,4 triazole (5 carbon) alanine olefin amino acid connected by an all-carbon crosslinker comprising one double bond
  C-term NH2
LTFAAYWAALAAAMA

SEQ ID NO: 1558 - protein, 15 aa, Artificial Sequence
  Description of Artificial Sequence: Synthetic peptide
  N-term Ac
  MOD_RES (4)..(4): Alpha-Me R-azide 1,4 triazole (6 carbon) alanine olefin amino acid connected by an all-carbon crosslinker comprising one double bond
  misc_feature (4)..(11): Crosslink between residues
  MOD_RES (11)..(11): Alpha-Me alkyne 1,4 triazole (5 carbon) alanine olefin amino acid connected by an all-carbon crosslinker comprising one double bond
  C-term NH2
LTFAAYWAALAAAMA

SEQ ID NO: 1559 - protein, 15 aa, Artificial Sequence
  Description of Artificial Sequence: Synthetic peptide
  N-term Ac
  MOD_RES (4)..(4): Alpha-Me R-azide 1,4 triazole (6 carbon) alanine olefin amino acid connected by an all-carbon crosslinker comprising one double bond
  misc_feature (4)..(11): Crosslink between residues
  MOD_RES (11)..(11): Alpha-Me alkyne 1,4 triazole (5 carbon) alanine olefin amino acid connected by an all-carbon crosslinker comprising one double bond
  MOD_RES (15)..(15): D-amino acid
  C-term NH2
LTFAAYWAQLAAAIA

SEQ ID NO: 1560 - protein, 15 aa, Artificial Sequence
  Description of Artificial Sequence: Synthetic peptide
  N-term Ac
  MOD_RES (4)..(4): Alpha-Me R-azide 1,4 triazole (6 carbon) alanine olefin amino acid connected by an all-carbon crosslinker comprising one double bond
  misc_feature (4)..(11): Crosslink between residues
  MOD_RES (11)..(11): Alpha-Me alkyne 1,4 triazole (5 carbon) alanine olefin amino acid connected by an all-carbon crosslinker comprising one double bond
  MOD_RES (15)..(15): D-amino acid
  C-term NH2
LTFAAYWAQLAAAIA

SEQ ID NO: 1561 - protein, 15 aa, Artificial Sequence
  Description of Artificial Sequence: Synthetic peptide
  N-term Ac
  MOD_RES (4)..(4): Alpha-Me R-azide 1,4 triazole (6 carbon) alanine olefin amino acid connected by an all-carbon crosslinker comprising one double bond
  misc_feature (4)..(11): Crosslink between residues
  MOD_RES (11)..(11): Alpha-Me alkyne 1,4 triazole (5 carbon) alanine olefin amino acid connected by an all-carbon crosslinker comprising one double bond
  MOD_RES (15)..(15): D-amino acid
  C-term NH2
LTFAAYWAALAAAMA

SEQ ID NO: 1562 - protein, 15 aa, Artificial Sequence
  Description of Artificial Sequence: Synthetic peptide
  N-term Ac
  MOD_RES (4)..(4): Alpha-Me R-azide 1,4 triazole (6 carbon) alanine olefin amino acid connected by an all-carbon crosslinker comprising one double bond
  misc_feature (4)..(11): Crosslink between residues
  MOD_RES (11)..(11): Alpha-Me alkyne 1,4 triazole (5 carbon) alanine olefin amino acid connected by an all-carbon crosslinker comprising one double bond
  MOD_RES (15)..(15): D-amino acid
  C-term NH2
LTFAAYWAALAAAMA

SEQ ID NO: 1563 - protein, 15 aa, Artificial Sequence
  Description of Artificial Sequence: Synthetic peptide
  N-term Ac
  MOD_RES (4)..(4): Alpha-Me R-azide 1,4 triazole (6 carbon) alanine olefin amino acid connected by an all-carbon crosslinker comprising one double bond
  misc_feature (4)..(11): Crosslink between residues
  MOD_RES (11)..(11): Alpha-Me alkyne 1,4 triazole (5 carbon) alanine olefin amino acid connected by an all-carbon crosslinker comprising one double bond
  MOD_RES (15)..(15): D-amino acid
  C-term NH2
LTFAAYWAALAAAIV

SEQ ID NO: 1564 - protein, 15 aa, Artificial Sequence
  Description of Artificial Sequence: Synthetic peptide
  N-term Ac
  MOD_RES (4)..(4): Alpha-Me R-azide 1,4 triazole (6 carbon) alanine olefin amino acid connected by an all-carbon crosslinker comprising one double bond
  misc_feature (4)..(11): Crosslink between residues
  MOD_RES (11)..(11): Alpha-Me alkyne 1,4 triazole (5 carbon) alanine olefin amino acid connected by an all-carbon crosslinker comprising one double bond
  MOD_RES (15)..(15): D-amino acid
  C-term NH2
LTFAAYWAALAAAIV

SEQ ID NO: 1565 - protein, 15 aa, Artificial Sequence
  Description of Artificial Sequence: Synthetic peptide
  N-term Ac
  MOD_RES (4)..(4): Alpha-Me R-azide 1,4 triazole (6 carbon) alanine olefin amino acid connected by an all-carbon crosslinker comprising one double bond
  misc_feature (4)..(11): Crosslink between residues
  MOD_RES (11)..(11): Alpha-Me alkyne 1,4 triazole (5 carbon) alanine olefin amino acid connected by an all-carbon crosslinker comprising one double bond
  MOD_RES (15)..(15): D-amino acid
  C-term NH2
LTFAAYWAQLAAAMV

SEQ ID NO: 1566 - protein, 15 aa, Artificial Sequence
  Description of Artificial Sequence: Synthetic peptide
  N-term Ac
  MOD_RES (4)..(4): Alpha-Me R-azide 1,4 triazole (6 carbon) alanine olefin amino acid connected by an all-carbon crosslinker comprising one double bond
  misc_feature (4)..(11): Crosslink between residues
  MOD_RES (11)..(11): Alpha-Me alkyne 1,4 triazole (5 carbon) alanine olefin amino acid connected by an all-carbon crosslinker comprising one double bond
  MOD_RES (14)..(14): Norleucine
  MOD_RES (15)..(15): D-amino acid
  C-term NH2
LTFAAYWAALAAALV

SEQ ID NO: 1567 - protein, 15 aa, Artificial Sequence
  Description of Artificial Sequence: Synthetic peptide
  N-term Ac
  MOD_RES (4)..(4): Alpha-Me R-azide 1,4 triazole (6 carbon) alanine olefin amino acid connected by an all-carbon crosslinker comprising one double bond
  misc_feature (4)..(11): Crosslink between residues
  MOD_RES (11)..(11): Alpha-Me alkyne 1,4 triazole (5 carbon) alanine olefin amino acid connected by an all-carbon crosslinker comprising one double bond
  MOD_RES (14)..(14): Norleucine
  MOD_RES (15)..(15): D-amino acid
  C-term NH2
LTFAAYWAALAAALV

SEQ ID NO: 1568 - protein, 15 aa, Artificial Sequence
  Description of Artificial Sequence: Synthetic peptide
  N-term Ac
  MOD_RES (4)..(4): Alpha-Me R-azide 1,4 triazole (6 carbon) alanine olefin amino acid connected by an all-carbon crosslinker comprising one double bond
  misc_feature (4)..(11): Crosslink between residues
  MOD_RES (11)..(11): Alpha-Me alkyne 1,4 triazole (5 carbon) alanine olefin amino acid connected by an all-carbon crosslinker comprising one double bond
  MOD_RES (15)..(15): D-amino acid
  C-term NH2
LTFAAYWAQLAAAIL

SEQ ID NO: 1569 - protein, 15 aa, Artificial Sequence
  Description of Artificial Sequence: Synthetic peptide
  N-term Ac
  MOD_RES (4)..(4): Alpha-Me R-azide 1,4 triazole (6 carbon) alanine olefin amino acid connected by an all-carbon crosslinker comprising one double bond
  misc_feature (4)..(11): Crosslink between residues
  MOD_RES (11)..(11): Alpha-Me alkyne 1,4 triazole (5 carbon) alanine olefin amino acid connected by an all-carbon crosslinker comprising one double bond
  MOD_RES (15)..(15): D-amino acid
  C-term NH2
LTFAAYWAQLAAAIL

SEQ ID NO: 1570 - protein, 15 aa, Artificial Sequence
  Description of Artificial Sequence: Synthetic peptide
  N-term Ac
  MOD_RES (4)..(4): Alpha-Me R-azide 1,4 triazole (6 carbon) alanine olefin amino acid connected by an all-carbon crosslinker comprising one double bond
  misc_feature (4)..(11): Crosslink between residues
  MOD_RES (11)..(11): Alpha-Me alkyne 1,4 triazole (5 carbon) alanine olefin amino acid connected by an all-carbon crosslinker comprising one double bond
  MOD_RES (15)..(15): D-amino acid
  C-term NH2
LTFAAYWAALAAAML

SEQ ID NO: 1571 - protein, 15 aa, Artificial Sequence
  Description of Artificial Sequence: Synthetic peptide
  N-term Ac
  MOD_RES (4)..(4): Alpha-Me R-azide 1,4 triazole (6 carbon) alanine olefin amino acid connected by an all-carbon crosslinker comprising one double bond
  misc_feature (4)..(11): Crosslink between residues
  MOD_RES (11)..(11): Alpha-Me alkyne 1,4 triazole (5 carbon) alanine olefin amino acid connected by an all-carbon crosslinker comprising one double bond
  MOD_RES (14)..(14): Norleucine
  MOD_RES (15)..(15): D-amino acid
  C-term NH2
LTFAAYWAQLAAALL

SEQ ID NO: 1572 - protein, 15 aa, Artificial Sequence
  Description of Artificial Sequence: Synthetic peptide
  N-term Ac
  MOD_RES (4)..(4): Alpha-Me R-azide 1,4 triazole (6 carbon) alanine olefin amino acid connected by an all-carbon crosslinker comprising one double bond
  misc_feature (4)..(11): Crosslink between residues
  MOD_RES (11)..(11): Alpha-Me alkyne 1,4 triazole (5 carbon) alanine olefin amino acid connected by an all-carbon crosslinker comprising one double bond
  MOD_RES (14)..(14): Norleucine
  MOD_RES (15)..(15): D-amino acid
  C-term NH2
LTFAAYWAQLAAALL

SEQ ID NO: 1573 - protein, 13 aa, Artificial Sequence
  Description of Artificial Sequence: Synthetic peptide
  N-term Ac
  MOD_RES (2)..(2): Alpha-Me R-azide 1,4 triazole (6 carbon) alanine olefin amino acid connected by an all-carbon crosslinker comprising one double bond
  misc_feature (2)..(9): Crosslink between residues
  MOD_RES (9)..(9): Alpha-Me alkyne 1,4 triazole (5 carbon) alanine olefin amino acid connected by an all-carbon crosslinker comprising one double bond
  C-term NH2
FAAYWEALAAAMA

SEQ ID NO: 1574 - protein, 13 aa, Artificial Sequence
  Description of Artificial Sequence: Synthetic peptide
  N-term Ac
  MOD_RES (2)..(2): Alpha-Me R-azide 1,4 triazole (6 carbon) alanine olefin amino acid connected by an all-carbon crosslinker comprising one double bond
  misc_feature (2)..(9): Crosslink between residues
  MOD_RES (9)..(9): Alpha-Me alkyne 1,4 triazole (5 carbon) alanine olefin amino acid connected by an all-carbon crosslinker comprising one double bond
  MOD_RES (12)..(12): Norleucine
  C-term NH2
FAAYWEALAAALA

SEQ ID NO: 1575 - protein, 13 aa, Artificial Sequence
  Description of Artificial Sequence: Synthetic peptide
  N-term Ac
  MOD_RES (2)..(2): Alpha-Me R-azide 1,4 triazole (6 carbon) alanine olefin amino acid connected by an all-carbon crosslinker comprising one double bond
  misc_feature (2)..(9): Crosslink between residues
  MOD_RES (9)..(9): Alpha-Me alkyne 1,4 triazole (5 carbon) alanine olefin amino acid connected by an all-carbon crosslinker comprising one double bond
  MOD_RES (13)..(13): D-amino acid
  C-term NH2
FAAYWEALAAAIA

SEQ ID NO: 1576 - protein, 13 aa, Artificial Sequence
  Description of Artificial Sequence: Synthetic peptide
  N-term Ac
  MOD_RES (2)..(2): Alpha-Me R-azide 1,4 triazole (6 carbon) alanine olefin amino acid connected by an all-carbon crosslinker comprising one double bond
  misc_feature (2)..(9): Crosslink between residues
  MOD_RES (9)..(9): Alpha-Me alkyne 1,4 triazole (5 carbon) alanine olefin amino acid connected by an all-carbon crosslinker comprising one double bond
  MOD_RES (13)..(13): D-amino acid
  C-term NH2
FAAYWEALAAAMA

SEQ ID NO: 1577 - protein, 13 aa, Artificial Sequence
  Description of Artificial Sequence: Synthetic peptide
  N-term Ac
  MOD_RES (2)..(2): Alpha-Me R-azide 1,4 triazole (6 carbon) alanine olefin amino acid connected by an all-carbon crosslinker comprising one double bond
  misc_feature (2)..(9): Crosslink between residues
  MOD_RES (9)..(9): Alpha-Me alkyne 1,4 triazole (5 carbon) alanine olefin amino acid connected by an all-carbon crosslinker comprising one double bond
  MOD_RES (12)..(12): Norleucine
  MOD_RES (13)..(13): D-amino acid
  C-term NH2
FAAYWEALAAALA

SEQ ID NO: 1578 - protein, 13 aa, Artificial Sequence
  Description of Artificial Sequence: Synthetic peptide
  N-term Ac
  MOD_RES (2)..(2): Alpha-Me R-azide 1,4 triazole (6 carbon) alanine olefin amino acid connected by an all-carbon crosslinker comprising one double bond
  misc_feature (2)..(9): Crosslink between residues
  MOD_RES (9)..(9): Alpha-Me alkyne 1,4 triazole (5 carbon) alanine olefin amino acid connected by an all-carbon crosslinker comprising one double bond
  MOD_RES (13)..(13): D-amino acid
  C-term NH2
FAAYWEALAAAIV

SEQ ID NO: 1579 - protein, 13 aa, Artificial Sequence
  Description of Artificial Sequence: Synthetic peptide
  N-term Ac
  MOD_RES (2)..(2): Alpha-Me R-azide 1,4 triazole (6 carbon) alanine olefin amino acid connected by an all-carbon crosslinker comprising one double bond
  misc_feature (2)..(9): Crosslink between residues
  MOD_RES (9)..(9): Alpha-Me alkyne 1,4 triazole (5 carbon) alanine olefin amino acid connected by an all-carbon crosslinker comprising one double bond
  MOD_RES (13)..(13): D-amino acid
  C-term NH2
FAAYWEALAAAMV

SEQ ID NO: 1580 - protein, 13 aa, Artificial Sequence
  Description of Artificial Sequence: Synthetic peptide
  N-term Ac
  MOD_RES (2)..(2): Alpha-Me R-azide 1,4 triazole (6 carbon) alanine olefin amino acid connected by an all-carbon crosslinker comprising one double bond
  misc_feature (2)..(9): Crosslink between residues
  MOD_RES (9)..(9): Alpha-Me alkyne 1,4 triazole (5 carbon) alanine olefin amino acid connected by an all-carbon crosslinker comprising one double bond
  MOD_RES (12)..(12): Norleucine
  MOD_RES (13)..(13): D-amino acid
  C-term NH2
FAAYWEALAAALV

SEQ ID NO: 1581 - protein, 13 aa, Artificial Sequence
  Description of Artificial Sequence: Synthetic peptide
  N-term Ac
  MOD_RES (2)..(2): Alpha-Me R-azide 1,4 triazole (6 carbon) alanine olefin amino acid connected by an all-carbon crosslinker comprising one double bond
  misc_feature (2)..(9): Crosslink between residues
  MOD_RES (9)..(9): Alpha-Me alkyne 1,4 triazole (5 carbon) alanine olefin amino acid connected by an all-carbon crosslinker comprising one double bond
  MOD_RES (13)..(13): D-amino acid
  C-term NH2
FAAYWEALAAAIL

SEQ ID NO: 1582 - protein, 13 aa, Artificial Sequence
  Description of Artificial Sequence: Synthetic peptide
  N-term Ac
  MOD_RES (2)..(2): Alpha-Me R-azide 1,4 triazole (6 carbon) alanine olefin amino acid connected by an all-carbon crosslinker comprising one double bond
  misc_feature (2)..(9): Crosslink between residues
  MOD_RES (9)..(9): Alpha-Me alkyne 1,4 triazole (5 carbon) alanine olefin amino acid connected by an all-carbon crosslinker comprising one double bond
  MOD_RES (13)..(13): D-amino acid
  C-term NH2
FAAYWEALAAAML

SEQ ID NO: 1583 - protein, 13 aa, Artificial Sequence
  Description of Artificial Sequence: Synthetic peptide
  N-term Ac
  MOD_RES (2)..(2): Alpha-Me R-azide 1,4 triazole (6 carbon) alanine olefin amino acid connected by an all-carbon crosslinker comprising one double bond
  misc_feature (2)..(9): Crosslink between residues
  MOD_RES (9)..(9): Alpha-Me alkyne 1,4 triazole (5 carbon) alanine olefin amino acid connected by an all-carbon crosslinker comprising one double bond
  MOD_RES (12)..(12): Norleucine
  MOD_RES (13)..(13): D-amino acid
  C-term NH2
FAAYWEALAAALL

SEQ ID NO: 1584 - protein, 13 aa, Artificial Sequence
  Description of Artificial Sequence: Synthetic peptide
  N-term Ac
  MOD_RES (2)..(2): Alpha-Me R-azide 1,4 triazole (6 carbon) alanine olefin amino acid connected by an all-carbon crosslinker comprising one double bond
  misc_feature (2)..(9): Crosslink between residues
  MOD_RES (9)..(9): Alpha-Me alkyne 1,4 triazole (5 carbon) alanine olefin amino acid connected by an all-carbon crosslinker comprising one double bond
  MOD_RES (12)..(12): Norleucine
  MOD_RES (13)..(13): D-amino acid
  C-term NH2
FAAYWEALAAALL

SEQ ID NO: 1585 - protein, 14 aa, Artificial Sequence
  Description of Artificial Sequence: Synthetic peptide
  N-term Ac
  MOD_RES (4)..(4): Alpha-Me R-azide 1,4 triazole (6 carbon) alanine olefin amino acid connected by an all-carbon crosslinker comprising one double bond
  misc_feature (4)..(11): Crosslink between residues
  MOD_RES (7)..(7): 6cl-Trp
  MOD_RES (11)..(11): Alpha-Me alkyne 1,4 triazole (5 carbon) alanine olefin amino acid connected by an all-carbon crosslinker comprising one double bond
  C-term NH2
LTFAAYWAQLASAA

SEQ ID NO: 1586 - protein, 14 aa, Artificial Sequence
  Description of Artificial Sequence: Synthetic peptide
  N-term Ac
  MOD_RES (4)..(4): Alpha-Me R-azide 1,4 triazole (6 carbon) alanine olefin amino acid connected by an all-carbon crosslinker comprising one double bond
  misc_feature (4)..(11): Crosslink between residues
  MOD_RES (7)..(7): 6cl-Trp
  MOD_RES (11)..(11): Alpha-Me alkyne 1,4 triazole (5 carbon) alanine olefin amino acid connected by an all-carbon crosslinker comprising one double bond
  C-term NH2
LTFAAYWAQLASAA

SEQ ID NO: 1587 - protein, 15 aa, Artificial Sequence
  Description of Artificial Sequence: Synthetic peptide
  N-term Ac
  MOD_RES (4)..(4): Alpha-Me R-azide 1,4 triazole (6 carbon) alanine olefin amino acid connected by an all-carbon crosslinker comprising one double bond
  misc_feature (4)..(11): Crosslink between residues
  MOD_RES (11)..(11): Alpha-Me alkyne 1,4 triazole (5 carbon) alanine olefin amino acid connected by an all-carbon crosslinker comprising one double bond
  MOD_RES (15)..(15): D-amino acid
  C-term NH2
WTFAFYWSQLAAVAA

SEQ ID NO: 1588 - protein, 15 aa, Artificial Sequence
  Description of Artificial Sequence: Synthetic peptide
  N-term Ac
  MOD_RES (4)..(4): Alpha-Me R-azide 1,4 triazole (6 carbon) alanine olefin amino acid connected by an all-carbon crosslinker comprising one double bond
  misc_feature (4)..(11): Crosslink between residues
  MOD_RES (11)..(11): Alpha-Me alkyne 1,4 triazole (5 carbon) alanine olefin amino acid connected by an all-carbon crosslinker comprising one double bond
  MOD_RES (15)..(15): D-amino acid
  C-term NH2
WTFAFYWSQLAAVAA

SEQ ID NO: 1589 - protein, 14 aa, Artificial Sequence
  Description of Artificial Sequence: Synthetic peptide
  N-term Ac
  MOD_RES (4)..(4): Alpha-Me R-azide 1,4 triazole (6 carbon) alanine olefin amino acid connected by an all-carbon crosslinker comprising one double bond
  misc_feature (4)..(11): Crosslink between residues
  MOD_RES (11)..(11): Alpha-Me alkyne 1,4 triazole (5 carbon) alanine olefin amino acid connected by an all-carbon crosslinker comprising one double bond
  C-term NH2
WTFAVYWSQLAAVA

SEQ ID NO: 1590 - protein, 14 aa, Artificial Sequence
  Description of Artificial Sequence: Synthetic peptide
  N-term Ac
  MOD_RES (4)..(4): Alpha-Me R-azide 1,4 triazole (6 carbon) alanine olefin amino acid connected by an all-carbon crosslinker comprising one double bond
  misc_feature (4)..(11): Crosslink between residues
  MOD_RES (11)..(11): Alpha-Me alkyne 1,4 triazole (5 carbon) alanine olefin amino acid connected by an all-carbon crosslinker comprising one double bond
  C-term NH2
WTFAVYWSQLAAVA

SEQ ID NO: 1591 - protein, 15 aa, Artificial Sequence
  Description of Artificial Sequence: Synthetic peptide
  N-term Ac
  MOD_RES (4)..(4): Alpha-Me R-azide 1,4 triazole (6 carbon) alanine olefin amino acid connected by an all-carbon crosslinker comprising one double bond
  misc_feature (4)..(11): Crosslink between residues
  MOD_RES (11)..(11): Alpha-Me alkyne 1,4 triazole (5 carbon) alanine olefin amino acid connected by an all-carbon crosslinker comprising one double bond
  MOD_RES (15)..(15): D-amino acid
  C-term NH2
WTFAFYWSQLASAAA

SEQ ID NO: 1592 - protein, 15 aa, Artificial Sequence
  Description of Artificial Sequence: Synthetic peptide
  N-term Ac
  MOD_RES (4)..(4): Alpha-Me R-azide 1,4 triazole (6 carbon) alanine olefin amino acid connected by an all-carbon crosslinker comprising one double bond
  misc_feature (4)..(11): Crosslink between residues
  MOD_RES (11)..(11): Alpha-Me alkyne 1,4 triazole (5 carbon) alanine olefin amino acid connected by an all-carbon crosslinker comprising one double bond
  MOD_RES (15)..(15): D-amino acid
  C-term NH2
WTFAFYWSQLASAAA

SEQ ID NO: 1593 - protein, 16 aa, Artificial Sequence
  Description of Artificial Sequence: Synthetic peptide
  N-term Ac
  MOD_RES (4)..(4): Alpha-Me R-azide 1,4 triazole (6 carbon) alanine olefin amino acid connected by an all-carbon crosslinker comprising one double bond
  misc_feature (4)..(11): Crosslink between residues
  MOD_RES (11)..(11): Alpha-Me alkyne 1,4 triazole (5 carbon) alanine olefin amino acid connected by an all-carbon crosslinker comprising one double bond
  MOD_RES (15)..(16): D-amino acid
  C-term NH2
WTFAVYWSQLAAVAAA

SEQ ID NO: 1594 - protein, 16 aa, Artificial Sequence
  Description of Artificial Sequence: Synthetic peptide
  N-term Ac
  MOD_RES (4)..(4): Alpha-Me R-azide 1,4 triazole (6 carbon) alanine olefin amino acid connected by an all-carbon crosslinker comprising one double bond
  misc_feature (4)..(11): Crosslink between residues
  MOD_RES (11)..(11): Alpha-Me alkyne 1,4 triazole (5 carbon) alanine olefin amino acid connected by an all-carbon crosslinker comprising one double bond
  MOD_RES (15)..(16): D-amino acid
  C-term NH2
WTFAVYWSQLAAVAAA

SEQ ID NO: 1595 - protein, 14 aa, Artificial Sequence
  Description of Artificial Sequence: Synthetic peptide
  N-term Ac
  MOD_RES (4)..(4): Alpha-Me R-azide 1,4 triazole (6 carbon) alanine olefin amino acid connected by an all-carbon crosslinker comprising one double bond
  misc_feature (4)..(11): Crosslink between residues
  MOD_RES (11)..(11): Alpha-Me alkyne 1,4 triazole (5 carbon) alanine olefin amino acid connected by an all-carbon crosslinker comprising one double bond
  C-term NH2
LTFAAYWAQLAAVG

SEQ ID NO: 1596 - protein, 14 aa, Artificial Sequence
  Description of Artificial Sequence: Synthetic peptide
  N-term Ac
  MOD_RES (4)..(4): Alpha-Me R-azide 1,4 triazole (6 carbon) alanine olefin amino acid connected by an all-carbon crosslinker comprising one double bond
  misc_feature (4)..(11): Crosslink between residues
  MOD_RES (11)..(11): Alpha-Me alkyne 1,4 triazole (5 carbon) alanine olefin amino acid connected by an all-carbon crosslinker comprising one double bond
  C-term NH2
LTFAAYWAQLAAVG

SEQ ID NO: 1597 - protein, 14 aa, Artificial Sequence
  Description of Artificial Sequence: Synthetic peptide
  N-term Ac
  MOD_RES (4)..(4): Alpha-Me R-azide 1,4 triazole (6 carbon) alanine olefin amino acid connected by an all-carbon crosslinker comprising one double bond
  misc_feature (4)..(11): Crosslink between residues
  MOD_RES (11)..(11): Alpha-Me alkyne 1,4 triazole (5 carbon) alanine olefin amino acid connected by an all-carbon crosslinker comprising one double bond
  C-term NH2
LTFAAYWAQLAAVQ

SEQ ID NO: 1598 - protein, 14 aa, Artificial Sequence
  Description of Artificial Sequence: Synthetic peptide
  N-term Ac
  MOD_RES (4)..(4): Alpha-Me R-azide 1,4 triazole (6 carbon) alanine olefin amino acid connected by an all-carbon crosslinker comprising one double bond
  misc_feature (4)..(11): Crosslink between residues
  MOD_RES (11)..(11): Alpha-Me alkyne 1,4 triazole (5 carbon) alanine olefin amino acid connected by an all-carbon crosslinker comprising one double bond
  C-term NH2
LTFAAYWAQLAAVQ

SEQ ID NO: 1599 - protein, 14 aa, Artificial Sequence
  Description of Artificial Sequence: Synthetic peptide
  N-term Ac
  MOD_RES (4)..(4): Alpha-Me R-azide 1,4 triazole (6 carbon) alanine olefin amino acid connected by an all-carbon crosslinker comprising one double bond
  misc_feature (4)..(11): Crosslink between residues
  MOD_RES (11)..(11): Alpha-Me alkyne 1,4 triazole (5 carbon) alanine olefin amino acid connected by an all-carbon crosslinker comprising one double bond
  MOD_RES (14)..(14): D-amino acid
  C-term NH2
LTFAAYWAQLASAA

SEQ ID NO: 1600 - protein, 14 aa, Artificial Sequence
  Description of Artificial Sequence: Synthetic peptide
  N-term Ac
  MOD_RES (4)..(4): Alpha-Me R-azide 1,4 triazole (6 carbon) alanine olefin amino acid connected by an all-carbon crosslinker comprising one double bond
  misc_feature (4)..(11): Crosslink between residues
  MOD_RES (11)..(11): Alpha-Me alkyne 1,4 triazole (5 carbon) alanine olefin amino acid connected by an all-carbon crosslinker comprising one double bond
  MOD_RES (14)..(14): D-amino acid
  C-term NH2
LTFAAYWAQLASAA

SEQ ID NO: 1601 - protein, 14 aa, Artificial Sequence
  Description of Artificial Sequence: Synthetic peptide
  N-term Ac
  MOD_RES (4)..(4): Alpha-Me R-azide 1,4 triazole (6 carbon) alanine olefin amino acid connected by an all-carbon crosslinker comprising one double bond
  misc_feature (4)..(11): Crosslink between residues
  MOD_RES (10)..(10): homo-Leu
  MOD_RES (11)..(11): Alpha-Me alkyne 1,4 triazole (5 carbon) alanine olefin amino acid connected by an all-carbon crosslinker comprising one double bond
  C-term NH2
LTFAAYWAQLASAA

SEQ ID NO: 1602 - protein, 14 aa, Artificial Sequence
  Description of Artificial Sequence: Synthetic peptide
  N-term Ac
  MOD_RES (4)..(4): Alpha-Me R-azide 1,4 triazole (6 carbon) alanine olefin amino acid connected by an all-carbon crosslinker comprising one double bond
  misc_feature (4)..(11): Crosslink between residues
  MOD_RES (10)..(10): homo-Leu
  MOD_RES (11)..(11): Alpha-Me alkyne 1,4 triazole (5 carbon) alanine olefin amino acid connected by an all-carbon crosslinker comprising one double bond
  C-term NH2
LTFAAYWAQLASAA

SEQ ID NO: 1603 - protein, 14 aa, Artificial Sequence
  Description of Artificial Sequence: Synthetic peptide
  N-term Ac
  MOD_RES (4)..(4): Alpha-Me R-azide 1,4 triazole (6 carbon) alanine olefin amino acid connected by an all-carbon crosslinker comprising one double bond
  misc_feature (4)..(11): Crosslink between residues
  MOD_RES (11)..(11): Amino acid comprising two pentenyl-alanine olefin side chains, each of which is crosslinked to another amino acid as indicated
  misc_feature (11)..(14): Crosslink between residues
  MOD_RES (14)..(14): Alpha-Me alkyne 1,4 triazole (5 carbon) alanine olefin amino acid connected by an all-carbon crosslinker comprising one double bond
  C-term NH2
LTFAAYWEQLASAA

SEQ ID NO: 1604 - protein, 14 aa, Artificial Sequence
  Description of Artificial Sequence: Synthetic peptide
  N-term Ac
  MOD_RES (4)..(4): Alpha-Me R-azide 1,4 triazole (6 carbon) alanine olefin amino acid connected by an all-carbon crosslinker comprising one double bond
  misc_feature (4)..(11): Crosslink between residues
  MOD_RES (11)..(11): Alpha-Me alkyne 1,4 triazole (5 carbon) alanine olefin amino acid connected by an all-carbon crosslinker comprising one double bond
  C-term NH2
LTFAAYWAQLASLA

SEQ ID NO: 1605 - protein, 14 aa, Artificial Sequence
  Description of Artificial Sequence: Synthetic peptide
  N-term Ac
  MOD_RES (4)..(4): Alpha-Me R-azide 1,4 triazole (6 carbon) alanine olefin amino acid connected by an all-carbon crosslinker comprising one double bond
  misc_feature (4)..(11): Crosslink between residues
  MOD_RES (11)..(11): Alpha-Me alkyne 1,4 triazole (5 carbon) alanine olefin amino acid connected by an all-carbon crosslinker comprising one double bond
  C-term NH2
LTFAAYWAQLASLA

SEQ ID NO: 1606 - protein, 14 aa, Artificial Sequence
  Description of Artificial Sequence: Synthetic peptide
  N-term Ac
  MOD_RES (4)..(4): Alpha-Me R-azide 1,4 triazole (6 carbon) alanine olefin amino acid connected by an all-carbon crosslinker comprising one double bond
  misc_feature (4)..(11): Crosslink between residues
  MOD_RES (11)..(11): Alpha-Me alkyne 1,4 triazole (5 carbon) alanine olefin amino acid connected by an all-carbon crosslinker comprising one double bond
  C-term NH2
LTFAAYWAQLASWA

SEQ ID NO: 1607 - protein, 14 aa, Artificial Sequence
  Description of Artificial Sequence: Synthetic peptide
  N-term Ac
  MOD_RES (4)..(4): Alpha-Me R-azide 1,4 triazole (6 carbon) alanine olefin amino acid connected by an all-carbon crosslinker comprising one double bond
  misc_feature (4)..(11): Crosslink between residues
  MOD_RES (11)..(11): Alpha-Me alkyne 1,4 triazole (5 carbon) alanine olefin amino acid connected by an all-carbon crosslinker comprising one double bond
  C-term NH2
LTFAAYWAQLASWA

SEQ ID NO: 1608 - protein, 14 aa, Artificial Sequence
  Description of Artificial Sequence: Synthetic peptide
  N-term Ac
  MOD_RES (4)..(4): Alpha-Me R-azide 1,4 triazole (6 carbon) alanine olefin amino acid connected by an all-carbon crosslinker comprising one double bond
  misc_feature (4)..(11): Crosslink between residues
  MOD_RES (11)..(11): Alpha-Me alkyne 1,4 triazole (5 carbon) alanine olefin amino acid connected by an all-carbon crosslinker comprising one double bond
  C-term NH2
LTFAAYWAQLASVS

SEQ ID NO: 1609 - protein, 14 aa, Artificial Sequence
  Description of Artificial Sequence: Synthetic peptide
  N-term Ac
  MOD_RES (4)..(4): Alpha-Me R-azide 1,4 triazole (6 carbon) alanine olefin amino acid connected by an all-carbon crosslinker comprising one double bond
  misc_feature (4)..(11): Crosslink between residues
  MOD_RES (11)..(11): Alpha-Me alkyne 1,4 triazole (5 carbon) alanine olefin amino acid connected by an all-carbon crosslinker comprising one double bond
  C-term NH2
LTFAAYWAQLASAS

SEQ ID NO: 1610 - protein, 14 aa, Artificial Sequence
  Description of Artificial Sequence: Synthetic peptide
  N-term Ac
  MOD_RES (4)..(4): Alpha-Me R-azide 1,4 triazole (6 carbon) alanine olefin amino acid connected by an all-carbon crosslinker comprising one double bond
  misc_feature (4)..(11): Crosslink between residues
  MOD_RES (11)..(11): Alpha-Me alkyne 1,4 triazole (5 carbon) alanine olefin amino acid connected by an all-carbon crosslinker comprising one double bond
  C-term NH2
LTFAAYWAQLASVG

SEQ ID NO: 1611 - protein, 14 aa, Artificial Sequence
  Description of Artificial Sequence: Synthetic peptide
  N-term Ac
  MOD_RES (4)..(4): Alpha-Me R-azide 1,4 triazole (6 carbon) alanine olefin amino acid connected by an all-carbon crosslinker comprising one double bond
  misc_feature (4)..(11): Crosslink between residues
  MOD_RES (11)..(11): Alpha-Me alkyne 1,4 triazole (5 carbon) alanine olefin amino acid connected by an all-carbon crosslinker comprising one double bond
  MOD_RES (14)..(14): D-amino acid
  C-term NH2
ETFAVYWAQLASAA

SEQ ID NO: 1612 - protein, 14 aa, Artificial Sequence
  Description of Artificial Sequence: Synthetic peptide
  N-term Ac
  MOD_RES (4)..(4): Alpha-Me R-azide 1,4 triazole (6 carbon) alanine olefin amino acid connected by an all-carbon crosslinker comprising one double bond
  misc_feature (4)..(11): Crosslink between residues
  MOD_RES (11)..(11): Alpha-Me alkyne 1,4 triazole (5 carbon) alanine olefin amino acid connected by an all-carbon crosslinker comprising one double bond
  C-term NH2
ETFAVYWAQLASAA

SEQ ID NO: 1613 - protein, 14 aa, Artificial Sequence
  Description of Artificial Sequence: Synthetic peptide
  N-term Ac
  MOD_RES (4)..(4): Alpha-Me R-azide 1,4 triazole (6 carbon) alanine olefin amino acid connected by an all-carbon crosslinker comprising one double bond
  misc_feature (4)..(11): Crosslink between residues
  MOD_RES (11)..(11): Alpha-Me alkyne 1,4 triazole (5 carbon) alanine olefin amino acid connected by an all-carbon crosslinker comprising one double bond
  C-term NH2
ETFAVYWAQLASVA

SEQ ID NO: 1614 - protein, 14 aa, Artificial Sequence
  Description of Artificial Sequence: Synthetic peptide
  N-term Ac
  MOD_RES (4)..(4): Alpha-Me R-azide 1,4 triazole (6 carbon) alanine olefin amino acid connected by an all-carbon crosslinker comprising one double bond
  misc_feature (4)..(11): Crosslink between residues
  MOD_RES (11)..(11): Alpha-Me alkyne 1,4 triazole (5 carbon) alanine olefin amino acid connected by an all-carbon crosslinker comprising one double bond
  C-term NH2
ETFAVYWAQLASLA

SEQ ID NO: 1615 - protein, 14 aa, Artificial Sequence
  Description of Artificial Sequence: Synthetic peptide
  N-term Ac
  MOD_RES (4)..(4): Alpha-Me R-azide 1,4 triazole (6 carbon) alanine olefin amino acid connected by an all-carbon crosslinker comprising one double bond
  misc_feature (4)..(11): Crosslink between residues
  MOD_RES (11)..(11): Alpha-Me alkyne 1,4 triazole (5 carbon) alanine olefin amino acid connected by an all-carbon crosslinker comprising one double bond
  C-term NH2
ETFAVYWAQLASWA

SEQ ID NO: 1616 - protein, 14 aa, Artificial Sequence
  Description of Artificial Sequence: Synthetic peptide
  N-term Ac
  MOD_RES (4)..(4): Alpha-Me R-azide 1,4 triazole (6 carbon) alanine olefin amino acid connected by an all-carbon crosslinker comprising one double bond
  misc_feature (4)..(11): Crosslink between residues
  MOD_RES (11)..(11): Alpha-Me alkyne 1,4 triazole (5 carbon) alanine olefin amino acid connected by an all-carbon crosslinker comprising one double bond
  C-term NH2
ETFAKYWAQLASWA

SEQ ID NO: 1617 - protein, 14 aa, Artificial Sequence
  Description of Artificial Sequence: Synthetic peptide
  N-term Ac
  MOD_RES (4)..(4): Alpha-Me R-azide 1,4 triazole (6 carbon) alanine olefin amino acid connected by an all-carbon crosslinker comprising one double bond
  misc_feature (4)..(11): Crosslink between residues
  MOD_RES (11)..(11): Alpha-Me alkyne 1,4 triazole (5 carbon) alanine olefin amino acid connected by an all-carbon crosslinker comprising one double bond
  C-term NH2
ETFAVYWAQLASVS

SEQ ID NO: 1618 - protein, 14 aa, Artificial Sequence
  Description of Artificial Sequence: Synthetic peptide
  N-term Ac
  MOD_RES (4)..(4): Alpha-Me R-azide 1,4 triazole (6 carbon) alanine olefin amino acid connected by an all-carbon crosslinker comprising one double bond
  misc_feature (4)..(11): Crosslink between residues
  MOD_RES (11)..(11): Alpha-Me alkyne 1,4 triazole (5 carbon) alanine olefin amino acid connected by an all-carbon crosslinker comprising one double bond
  C-term NH2
ETFAVYWAQLASAS

SEQ ID NO: 1619 - protein, 14 aa, Artificial Sequence
  Description of Artificial Sequence: Synthetic peptide
  N-term Ac
  MOD_RES (4)..(4): Alpha-Me R-azide 1,4 triazole (6 carbon) alanine olefin amino acid connected by an all-carbon crosslinker comprising one double bond
  misc_feature (4)..(11): Crosslink between residues
  MOD_RES (11)..(11): Alpha-Me alkyne 1,4 triazole (5 carbon) alanine olefin amino acid connected by an all-carbon crosslinker comprising one double bond
  C-term NH2
ETFAVYWAQLASVG

SEQ ID NO: 1620 - protein, 14 aa, Artificial Sequence
  Description of Artificial Sequence: Synthetic peptide
  N-term Ac
  MOD_RES (4)..(4): Alpha-Me R-azide 1,4 triazole (6 carbon) alanine olefin amino acid connected by an all-carbon crosslinker comprising one double bond
  misc_feature (4)..(11): Crosslink between residues
  MOD_RES (11)..(11): Alpha-Me alkyne 1,4 triazole (5 carbon) alanine olefin amino acid connected by an all-carbon crosslinker comprising one double bond
  MOD_RES (14)..(14): D-amino acid
  C-term NH2
LTFAVYWAQLASSA

SEQ ID NO: 1621 - protein, 14 aa, Artificial Sequence
  Description of Artificial Sequence: Synthetic peptide
  N-term Ac
  MOD_RES (4)..(4): Alpha-Me R-azide 1,4 triazole (6 carbon) alanine olefin amino acid connected by an all-carbon crosslinker comprising one double bond
  misc_feature (4)..(11): Crosslink between residues
  MOD_RES (11)..(11): Alpha-Me alkyne 1,4 triazole (5 carbon) alanine olefin amino acid connected by an all-carbon crosslinker comprising one double bond
  MOD_RES (14)..(14): D-amino acid
  C-term NH2
ETFAVYWAQLASSA

SEQ ID NO: 1622 - protein, 14 aa, Artificial Sequence
  Description of Artificial Sequence: Synthetic peptide
  N-term Ac
  MOD_RES (4)..(4): Alpha-Me R-azide 1,4 triazole (6 carbon) alanine olefin amino acid connected by an all-carbon crosslinker comprising one double bond
  misc_feature (4)..(11): Crosslink between residues
  MOD_RES (11)..(11): Alpha-Me alkyne 1,4 triazole (5 carbon) alanine olefin amino acid connected by an all-carbon crosslinker comprising one double bond
  MOD_RES (14)..(14): D-amino acid
  C-term NH2
LTFAVYWAQLASNA

SEQ ID NO: 1623 - protein, 14 aa, Artificial Sequence
  Description of Artificial Sequence: Synthetic peptide
  N-term Ac
  MOD_RES (4)..(4): Alpha-Me R-azide 1,4 triazole (6 carbon) alanine olefin amino acid connected by an all-carbon crosslinker comprising one double bond
  misc_feature (4)..(11): Crosslink between residues
  MOD_RES (11)..(11): Alpha-Me alkyne 1,4 triazole (5 carbon) alanine olefin amino acid connected by an all-carbon crosslinker comprising one double bond
  MOD_RES (14)..(14): D-amino acid
  C-term NH2
ETFAVYWAQLASNA

SEQ ID NO: 1624 - protein, 14 aa, Artificial Sequence
  Description of Artificial Sequence: Synthetic peptide
  N-term Ac
  MOD_RES (4)..(4): Alpha-Me R-azide 1,4 triazole (6 carbon) alanine olefin amino acid connected by an all-carbon crosslinker comprising one double bond
  misc_feature (4)..(11): Crosslink between residues
  MOD_RES (11)..(11): Alpha-Me alkyne 1,4 triazole (5 carbon) alanine olefin amino acid connected by an all-carbon crosslinker comprising one double bond
  MOD_RES (14)..(14): D-amino acid
  C-term NH2
LTFAVYWAQLASAA

SEQ ID NO: 1625 - protein, 14 aa, Artificial Sequence
  Description of Artificial Sequence: Synthetic peptide
  N-term Ac
  MOD_RES (4)..(4): Alpha-Me R-azide 1,4 triazole (6 carbon) alanine olefin amino acid connected by an all-carbon crosslinker comprising one double bond
  misc_feature (4)..(11): Crosslink between residues
  MOD_RES (11)..(11): Alpha-Me alkyne 1,4 triazole (5 carbon) alanine olefin amino acid connected by an all-carbon crosslinker comprising one double bond
  C-term NH2
LTFAVYWAQLASVA

SEQ ID NO: 1626 - protein, 14 aa, Artificial Sequence
  Description of Artificial Sequence: Synthetic peptide
  N-term Ac
  MOD_RES (4)..(4): Alpha-Me R-azide 1,4 triazole (6 carbon) alanine olefin amino acid connected by an all-carbon crosslinker comprising one double bond
  misc_feature (4)..(11): Crosslink between residues
  MOD_RES (11)..(11): Alpha-Me alkyne 1,4 triazole (5 carbon) alanine olefin amino acid connected by an all-carbon crosslinker comprising one double bond
  C-term NH2
LTFAVYWAQLASVA

SEQ ID NO: 1627 - protein, 14 aa, Artificial Sequence
  Description of Artificial Sequence: Synthetic peptide
  N-term Ac
  MOD_RES (4)..(4): Alpha-Me R-azide 1,4 triazole (6 carbon) alanine olefin amino acid connected by an all-carbon crosslinker comprising one double bond
  misc_feature (4)..(11): Crosslink between residues
  MOD_RES (11)..(11): Alpha-Me alkyne 1,4 triazole (5 carbon) alanine olefin amino acid connected by an all-carbon crosslinker comprising one double bond
  C-term NH2
LTFAVYWAQLASWA

SEQ ID NO: 1628 - protein, 14 aa, Artificial Sequence
  Description of Artificial Sequence: Synthetic peptide
  N-term Ac
  MOD_RES (4)..(4): Alpha-Me R-azide 1,4 triazole (6 carbon) alanine olefin amino acid connected by an all-carbon crosslinker comprising one double bond
  misc_feature (4)..(11): Crosslink between residues
  MOD_RES (11)..(11): Alpha-Me alkyne 1,4 triazole (5 carbon) alanine olefin amino acid connected by an all-carbon crosslinker comprising one double bond
  C-term NH2
LTFAVYWAQLASVS

SEQ ID NO: 1629 - protein, 14 aa, Artificial Sequence
  Description of Artificial Sequence: Synthetic peptide
  N-term Ac
  MOD_RES (4)..(4): Alpha-Me R-azide 1,4 triazole (6 carbon) alanine olefin amino acid connected by an all-carbon crosslinker comprising one double bond
  misc_feature (4)..(11): Crosslink between residues
  MOD_RES (11)..(11): Alpha-Me alkyne 1,4 triazole (5 carbon) alanine olefin amino acid connected by an all-carbon crosslinker comprising one double bond
  C-term NH2
LTFAVYWAQLASVS

SEQ ID NO: 1630 - protein, 14 aa, Artificial Sequence
  Description of Artificial Sequence: Synthetic peptide
  N-term Ac
  MOD_RES (4)..(4): Alpha-Me R-azide 1,4 triazole (6 carbon) alanine olefin amino acid connected by an all-carbon crosslinker comprising one double bond
  misc_feature (4)..(11): Crosslink between residues
  MOD_RES (11)..(11): Alpha-Me alkyne 1,4 triazole (5 carbon) alanine olefin amino acid connected by an all-carbon crosslinker comprising one double bond
  C-term NH2
LTFAVYWAQLASAS

SEQ ID NO: 1631 - protein, 14 aa, Artificial Sequence
  Description of Artificial Sequence: Synthetic peptide
  N-term Ac
  MOD_RES (4)..(4): Alpha-Me R-azide 1,4 triazole (6 carbon) alanine olefin amino acid connected by an all-carbon crosslinker comprising one double bond
  misc_feature (4)..(11): Crosslink between residues
  MOD_RES (11)..(11): Alpha-Me alkyne 1,4 triazole (5 carbon) alanine olefin amino acid connected by an all-carbon crosslinker comprising one double bond
  C-term NH2
LTFAVYWAQLASAS

SEQ ID NO: 1632 - protein, 14 aa, Artificial Sequence
  Description of Artificial Sequence: Synthetic peptide
  N-term Ac
  MOD_RES (4)..(4): Alpha-Me R-azide 1,4 triazole (6 carbon) alanine olefin amino acid connected by an all-carbon crosslinker comprising one double bond
  misc_feature (4)..(11): Crosslink between residues
  MOD_RES (11)..(11): Alpha-Me alkyne 1,4 triazole (5 carbon) alanine olefin amino acid connected by an all-carbon crosslinker comprising one double bond
  C-term NH2
LTFAVYWAQLASVG

SEQ ID NO: 1633 - protein, 14 aa, Artificial Sequence
  Description of Artificial Sequence: Synthetic peptide
  N-term Ac
  MOD_RES (4)..(4): Alpha-Me R-azide 1,4 triazole (6 carbon) alanine olefin amino acid connected by an all-carbon crosslinker comprising one double bond
  misc_feature (4)..(11): Crosslink between residues
  MOD_RES (11)..(11): Alpha-Me alkyne 1,4 triazole (5 carbon) alanine olefin amino acid connected by an all-carbon crosslinker comprising one double bond
  C-term NH2
LTFAVYWAQLASVG

SEQ ID NO: 1634 - protein, 14 aa, Artificial Sequence
  Description of Artificial Sequence: Synthetic peptide
  N-term Ac
  MOD_RES (4)..(4): Alpha-Me R-azide 1,4 triazole (6 carbon) alanine olefin amino acid connected by an all-carbon crosslinker comprising one double bond
  misc_feature (4)..(11): Crosslink between residues
  MOD_RES (10)..(10): Cyclohexyl-Ala
  MOD_RES (11)..(11): Alpha-Me alkyne 1,4 triazole (5 carbon) alanine olefin amino acid connected by an all-carbon crosslinker comprising one double bond
  C-term NH2
LTFAEYWAQAASAA

SEQ ID NO: 1635 - protein, 14 aa, Artificial Sequence
  Description of Artificial Sequence: Synthetic peptide
  N-term Ac
  MOD_RES (4)..(4): Alpha-Me R-azide 1,4 triazole (6 carbon) alanine olefin amino acid connected by an all-carbon crosslinker comprising one double bond
  misc_feature (4)..(11): Crosslink between residues
  MOD_RES (10)..(10): Cyclohexyl-Ala
  MOD_RES (11)..(11): Alpha-Me alkyne 1,4 triazole (5 carbon) alanine olefin amino acid connected by an all-carbon crosslinker comprising one double bond
  C-term NH2
LTFAEYWAQAASAA

SEQ ID NO: 1636 - protein, 14 aa, Artificial Sequence
  Description of Artificial Sequence: Synthetic peptide
  N-term Ac
  MOD_RES (4)..(4): Alpha-Me R-azide 1,4 triazole (6 carbon) alanine olefin amino acid connected by an all-carbon crosslinker comprising one double bond
  misc_feature (4)..(11): Crosslink between residues
  MOD_RES (10)..(10): Cyclopentyl-Gly
  MOD_RES (11)..(11): Alpha-Me alkyne 1,4 triazole (5 carbon) alanine olefin amino acid connected by an all-carbon crosslinker comprising one double bond
  C-term NH2
LTFAEYWAQGASAA

SEQ ID NO: 1637 - protein, 14 aa, Artificial Sequence
  Description of Artificial Sequence: Synthetic peptide
  N-term Ac
  MOD_RES (4)..(4): Alpha-Me R-azide 1,4 triazole (6 carbon) alanine olefin amino acid connected by an all-carbon crosslinker comprising one double bond
  misc_feature (4)..(11): Crosslink between residues
  MOD_RES (10)..(10): Cyclopentyl-Gly
  MOD_RES (11)..(11): Alpha-Me alkyne 1,4 triazole (5 carbon) alanine olefin amino acid connected by an all-carbon crosslinker comprising one double bond
  C-term NH2
LTFAEYWAQGASAA

SEQ ID NO: 1638 - protein, 14 aa, Artificial Sequence
  Description of Artificial Sequence: Synthetic peptide
  N-term Ac
  MOD_RES (4)..(4): Alpha-Me R-azide 1,4 triazole (6 carbon) alanine olefin amino acid connected by an all-carbon crosslinker comprising one double bond
  misc_feature (4)..(11): Crosslink between residues
  MOD_RES (11)..(11): Alpha-Me alkyne 1,4 triazole (5 carbon) alanine olefin amino acid connected by an all-carbon crosslinker comprising one double bond
  C-term NH2
LTFAEYWAQFASAA

SEQ ID NO: 1639 - protein, 14 aa, Artificial Sequence
  Description of Artificial Sequence: Synthetic peptide
  N-term Ac
  MOD_RES (4)..(4): Alpha-Me R-azide 1,4 triazole (6 carbon) alanine olefin amino acid connected by an all-carbon crosslinker comprising one double bond
  misc_feature (4)..(11): Crosslink between residues
  MOD_RES (11)..(11): Alpha-Me alkyne 1,4 triazole (5 carbon) alanine olefin amino acid connected by an all-carbon crosslinker comprising one double bond
  C-term NH2
LTFAEYWAQFASAA

SEQ ID NO: 1640 - protein, 14 aa, Artificial Sequence
  Description of Artificial Sequence: Synthetic peptide
  N-term Ac
  MOD_RES (3)..(3): 3-chloro-Phe
  MOD_RES (4)..(4): Alpha-Me R-azide 1,4 triazole (6 carbon) alanine olefin amino acid connected by an all-carbon crosslinker comprising one double bond
  misc_feature (4)..(11): Crosslink between residues
  MOD_RES (11)..(11): Alpha-Me alkyne 1,4 triazole (5 carbon) alanine olefin amino acid connected by an all-carbon crosslinker comprising one double bond
  C-term NH2
LTFAEYWAQLASAA

SEQ ID NO: 1641 - protein, 14 aa, Artificial Sequence
  Description of Artificial Sequence: Synthetic peptide
  N-term Ac
  MOD_RES (3)..(3): 3-chloro-Phe
  MOD_RES (4)..(4): Alpha-Me R-azide 1,4 triazole (6 carbon) alanine olefin amino acid connected by an all-carbon crosslinker comprising one double bond
  misc_feature (4)..(11): Crosslink between residues
  MOD_RES (11)..(11): Alpha-Me alkyne 1,4 triazole (5 carbon) alanine olefin amino acid connected by an all-carbon crosslinker comprising one double bond
  C-term NH2
LTFAEYWAQLASAA

SEQ ID NO: 1642 - protein, 14 aa, Artificial Sequence
  Description of Artificial Sequence: Synthetic peptide
  N-term Ac
  MOD_RES (3)..(3): 3,4-difluoro-Phe
  MOD_RES (4)..(4): Alpha-Me R-azide 1,4 triazole (6 carbon) alanine olefin amino acid connected by an all-carbon crosslinker comprising one double bond
  misc_feature (4)..(11): Crosslink between residues
  MOD_RES (11)..(11): Alpha-Me alkyne 1,4 triazole (5 carbon) alanine olefin amino acid connected by an all-carbon crosslinker comprising one double bond
  C-term NH2
LTFAEYWAQLASAA

SEQ ID NO: 1643 - protein, 14 aa, Artificial Sequence
  Description of Artificial Sequence: Synthetic peptide
  N-term Ac
  MOD_RES (3)..(3): 3,4-difluoro-Phe
  MOD_RES (4)..(4): Alpha-Me R-azide 1,4 triazole (6 carbon) alanine olefin amino acid connected by an all-carbon crosslinker comprising one double bond
  misc_feature (4)..(11): Crosslink between residues
  MOD_RES (11)..(11): Alpha-Me alkyne 1,4 triazole (5 carbon) alanine olefin amino acid connected by an all-carbon crosslinker comprising one double bond
  C-term NH2
LTFAEYWAQLASAA

SEQ ID NO: 1644 - protein, 14 aa, Artificial Sequence
  Description of Artificial Sequence: Synthetic peptide
  N-term Ac
  MOD_RES (3)..(3): 3,4-difluoro-Phe
  MOD_RES (4)..(4): Alpha-Me R-azide 1,4 triazole (6 carbon) alanine olefin amino acid connected by an all-carbon crosslinker comprising one double bond
  misc_feature (4)..(11): Crosslink between residues
  MOD_RES (10)..(10): homo-Leu
  MOD_RES (11)..(11): Alpha-Me alkyne 1,4 triazole (5 carbon) alanine olefin amino acid connected by an all-carbon crosslinker comprising one double bond
  C-term NH2
LTFAEYWAQLASAA

SEQ ID NO: 1645 - protein, 14 aa, Artificial Sequence
  Description of Artificial Sequence: Synthetic peptide
  N-term Ac
  MOD_RES (3)..(3): 3,4-difluoro-Phe
  MOD_RES (4)..(4): Alpha-Me R-azide 1,4 triazole (6 carbon) alanine olefin amino acid connected by an all-carbon crosslinker comprising one double bond
  misc_feature (4)..(11): Crosslink between residues
  MOD_RES (10)..(10): homo-Leu
  MOD_RES (11)..(11): Alpha-Me alkyne 1,4 triazole (5 carbon) alanine olefin amino acid connected by an all-carbon crosslinker comprising one double bond
  C-term NH2
LTFAEYWAQLASAA

SEQ ID NO: 1646 - protein, 14 aa, Artificial Sequence
  Description of Artificial Sequence: Synthetic peptide
  N-term Ac
  MOD_RES (4)..(4): Alpha-Me R-azide 1,4 triazole (6 carbon) alanine olefin amino acid connected by an all-carbon crosslinker comprising one double bond
  misc_feature (4)..(11): Crosslink between residues
  MOD_RES (11)..(11): Alpha-Me alkyne 1,4 triazole (5 carbon) alanine olefin amino acid connected by an all-carbon crosslinker comprising one double bond
  C-term NH2
ETFAEYWAQLASAA

SEQ ID NO: 1647 - protein, 14 aa, Artificial Sequence
  Description of Artificial Sequence: Synthetic peptide
  N-term Ac
  MOD_RES (4)..(4): Alpha-Me R-azide 1,4 triazole (6 carbon) alanine olefin amino acid connected by an all-carbon crosslinker comprising one double bond
  misc_feature (4)..(11): Crosslink between residues
  MOD_RES (11)..(11): Alpha-Me alkyne 1,4 triazole (5 carbon) alanine olefin amino acid connected by an all-carbon crosslinker comprising one double bond
  C-term NH2
LTFAAYWVQLASAA

SEQ ID NO: 1648 - protein, 14 aa, Artificial Sequence
  Description of Artificial Sequence: Synthetic peptide
  N-term Ac
  MOD_RES (4)..(4): Alpha-Me R-azide 1,4 triazole (6 carbon) alanine olefin amino acid connected by an all-carbon crosslinker comprising one double bond
  misc_feature (4)..(11): Crosslink between residues
  MOD_RES (11)..(11): Alpha-Me alkyne 1,4 triazole (5 carbon) alanine olefin amino acid connected by an all-carbon crosslinker comprising one double bond
  C-term NH2
LTFAAHWAQLASAA

SEQ ID NO: 1649 - protein, 14 aa, Artificial Sequence
  Description of Artificial Sequence: Synthetic peptide
  N-term Ac
  MOD_RES (4)..(4): Alpha-Me R-azide 1,4 triazole (6 carbon) alanine olefin amino acid connected by an all-carbon crosslinker comprising one double bond
  misc_feature (4)..(11): Crosslink between residues
  MOD_RES (11)..(11): Alpha-Me alkyne 1,4 triazole (5 carbon) alanine olefin amino acid connected by an all-carbon crosslinker comprising one double bond
  C-term NH2
LTFAAEWAQLASAA

SEQ ID NO: 1650 - protein, 14 aa, Artificial Sequence
  Description of Artificial Sequence: Synthetic peptide
  N-term Ac
  MOD_RES (4)..(4): Alpha-Me R-azide 1,4 triazole (6 carbon) alanine olefin amino acid connected by an all-carbon crosslinker comprising one double bond
  misc_feature (4)..(11): Crosslink between residues
  MOD_RES (11)..(11): Alpha-Me alkyne 1,4 triazole (5 carbon) alanine olefin amino acid connected by an all-carbon crosslinker comprising one double bond
  C-term NH2
LTFAASWAQLASAA

SEQ ID NO: 1651 - protein, 14 aa, Artificial Sequence
  Description of Artificial Sequence: Synthetic peptide
  N-term Ac
  MOD_RES (4)..(4): Alpha-Me R-azide 1,4 triazole (6 carbon) alanine olefin amino acid connected by an all-carbon crosslinker comprising one double bond
  misc_feature (4)..(11): Crosslink between residues
  MOD_RES (11)..(11): Alpha-Me alkyne 1,4 triazole (5 carbon) alanine olefin amino acid connected by an all-carbon crosslinker comprising one double bond
  C-term NH2
LTFAAEWAQLASAA

SEQ ID NO: 1652 - protein, 14 aa, Artificial Sequence
  Description of Artificial Sequence: Synthetic peptide
  N-term Ac
  MOD_RES (4)..(4): Alpha-Me R-azide 1,4 triazole (6 carbon) alanine olefin amino acid connected by an all-carbon crosslinker comprising one double bond
  misc_feature (4)..(11): Crosslink between residues
  MOD_RES (11)..(11): Alpha-Me alkyne 1,4 triazole (5 carbon) alanine olefin amino acid connected by an all-carbon crosslinker comprising one double bond
  C-term NH2
LTFAASWAQLASAA

SEQ ID NO: 1653 - protein, 14 aa, Artificial Sequence
  Description of Artificial Sequence: Synthetic peptide
  N-term Ac
  MOD_RES (4)..(4): Alpha-Me R-azide 1,4 triazole (6 carbon) alanine olefin amino acid connected by an all-carbon crosslinker comprising one double bond
  misc_feature (4)..(11): Crosslink between residues
  MOD_RES (6)..(6): 4-carboxy-Phe
  MOD_RES (11)..(11): Alpha-Me alkyne 1,4 triazole (5 carbon) alanine olefin amino acid connected by an all-carbon crosslinker comprising one double bond
  C-term NH2
LTFAAFWAQLASAA

SEQ ID NO: 1654 - protein, 14 aa, Artificial Sequence
  Description of Artificial Sequence: Synthetic peptide
  N-term Ac
  MOD_RES (4)..(4): Alpha-Me R-azide 1,4 triazole (6 carbon) alanine olefin amino acid connected by an all-carbon crosslinker comprising one double bond
  misc_feature (4)..(11): Crosslink between residues
  MOD_RES (6)..(6): 4-carboxy-Phe
  MOD_RES (11)..(11): Alpha-Me alkyne 1,4 triazole (5 carbon) alanine olefin amino acid connected by an all-carbon crosslinker comprising one double bond
  C-term NH2
LTFAAFWAQLASAA

SEQ ID NO: 1655 - protein, 15 aa, Artificial Sequence
  Description of Artificial Sequence: Synthetic peptide
  N-term Ac
  MOD_RES (4)..(4): Alpha-Me R-azide 1,4 triazole (6 carbon) alanine olefin amino acid connected by an all-carbon crosslinker comprising one double bond
  misc_feature (4)..(11): Crosslink between residues
  MOD_RES (11)..(11): Alpha-Me alkyne 1,4 triazole (5 carbon) alanine olefin amino acid connected by an all-carbon crosslinker comprising one double bond
  MOD_RES (15)..(15): D-amino acid
  C-term NH2
LTFAAHWAQLAAAIA

SEQ ID NO: 1656 - protein, 15 aa, Artificial Sequence
  Description of Artificial Sequence: Synthetic peptide
  N-term Ac
  MOD_RES (4)..(4): Alpha-Me R-azide 1,4 triazole (6 carbon) alanine olefin amino acid connected by an all-carbon crosslinker comprising one double bond
  misc_feature (4)..(11): Crosslink between residues
  MOD_RES (11)..(11): Alpha-Me alkyne 1,4 triazole (5 carbon) alanine olefin amino acid connected by an all-carbon crosslinker comprising one double bond
  MOD_RES (15)..(15): D-amino acid
  C-term NH2
ITFAFYWAQLAAAIA

SEQ ID NO: 1657 - protein, 15 aa, Artificial Sequence
  Description of Artificial Sequence: Synthetic peptide
  N-term Ac
  MOD_RES (4)..(4): Alpha-Me R-azide 1,4 triazole (6 carbon) alanine olefin amino acid connected by an all-carbon crosslinker comprising one double bond
  misc_feature (4)..(11): Crosslink between residues
  MOD_RES (11)..(11): Alpha-Me alkyne 1,4 triazole (5 carbon) alanine olefin amino acid connected by an all-carbon crosslinker comprising one double bond
  MOD_RES (15)..(15): D-amino acid
  C-term NH2
ITFAEHWAQLAAAIA

SEQ ID NO: 1658 - protein, 15 aa, Artificial Sequence
  Description of Artificial Sequence: Synthetic peptide
  N-term Ac
  MOD_RES (4)..(4): Alpha-Me R-azide 1,4 triazole (6 carbon) alanine olefin amino acid connected by an all-carbon crosslinker comprising one double bond
  misc_feature (4)..(11): Crosslink between residues
  MOD_RES (11)..(11): Alpha-Me alkyne 1,4 triazole (5 carbon) alanine olefin amino acid connected by an all-carbon crosslinker comprising one double bond
  MOD_RES (15)..(15): D-amino acid
  C-term NH2
ITFAEHWAQLAAAIA

SEQ ID NO: 1659 - protein, 15 aa, Artificial Sequence
  Description of Artificial Sequence: Synthetic peptide
  N-term Ac
  MOD_RES (4)..(4): Alpha-Me R-azide 1,4 triazole (6 carbon) alanine olefin amino acid connected by an all-carbon crosslinker comprising one double bond
  misc_feature (4)..(11): Crosslink between residues
  MOD_RES (11)..(11): Alpha-Me alkyne 1,4 triazole (5 carbon) alanine olefin amino acid connected by an all-carbon crosslinker comprising one double bond
  MOD_RES (15)..(15): D-amino acid
  C-term NH2
ETFAEHWAQLAAAIA

SEQ ID NO: 1660 - protein, 15 aa, Artificial Sequence
  Description of Artificial Sequence: Synthetic peptide
  N-term Ac
  MOD_RES (4)..(4): Alpha-Me R-azide 1,4 triazole (6 carbon) alanine olefin amino acid connected by an all-carbon crosslinker comprising one double bond
  misc_feature (4)..(11): Crosslink between residues
  MOD_RES (11)..(11): Alpha-Me alkyne 1,4 triazole (5 carbon) alanine olefin amino acid connected by an all-carbon crosslinker comprising one double bond
  MOD_RES (15)..(15): D-amino acid
  C-term NH2
ETFAEHWAQLAAAIA

SEQ ID NO: 1661 - protein, 15 aa, Artificial Sequence
  Description of Artificial Sequence: Synthetic peptide
  N-term Ac
  MOD_RES (4)..(4): Alpha-Me R-azide 1,4 triazole (6 carbon) alanine olefin amino acid connected by an all-carbon crosslinker comprising one double bond
  misc_feature (4)..(11): Crosslink between residues
  MOD_RES (11)..(11): Alpha-Me alkyne 1,4 triazole (5 carbon) alanine olefin amino acid connected by an all-carbon crosslinker comprising one double bond
  MOD_RES (15)..(15): D-amino acid
  C-term NH2
LTFAAHWVQLAAAIA

SEQ ID NO: 1662 - protein, 15 aa, Artificial Sequence
  Description of Artificial Sequence: Synthetic peptide
  N-term Ac
  MOD_RES (4)..(4): Alpha-Me R-azide 1,4 triazole (6 carbon) alanine olefin amino acid connected by an all-carbon crosslinker comprising one double bond
  misc_feature (4)..(11): Crosslink between residues
  MOD_RES (11)..(11): Alpha-Me alkyne 1,4 triazole (5 carbon) alanine olefin amino acid connected by an all-carbon crosslinker comprising one double bond
  MOD_RES (15)..(15): D-amino acid
  C-term NH2
ITFAFYWVQLAAAIA

SEQ ID NO: 1663 - protein, 15 aa, Artificial Sequence
  Description of Artificial Sequence: Synthetic peptide
  N-term Ac
  MOD_RES (4)..(4): Alpha-Me R-azide 1,4 triazole (6 carbon) alanine olefin amino acid connected by an all-carbon crosslinker comprising one double bond
  misc_feature (4)..(11): Crosslink between residues
  MOD_RES (11)..(11): Alpha-Me alkyne 1,4 triazole (5 carbon) alanine olefin amino acid connected by an all-carbon crosslinker comprising one double bond
  MOD_RES (15)..(15): D-amino acid
  C-term NH2
ITFAEYWVQLAAAIA

SEQ ID NO: 1664 - protein, 15 aa, Artificial Sequence
  Description of Artificial Sequence: Synthetic peptide
  N-term Ac
  MOD_RES (4)..(4): Alpha-Me R-azide 1,4 triazole (6 carbon) alanine olefin amino acid connected by an all-carbon crosslinker comprising one double bond
  misc_feature (4)..(11): Crosslink between residues
  MOD_RES (11)..(11): Alpha-Me alkyne 1,4 triazole (5 carbon) alanine olefin amino acid connected by an all-carbon crosslinker comprising one double bond
  MOD_RES (15)..(15): D-amino acid
  C-term NH2
ITFAEHWVQLAAAIA

SEQ ID NO: 1665 - protein, 15 aa, Artificial Sequence
  Description of Artificial Sequence: Synthetic peptide
  N-term Ac
  MOD_RES (4)..(4): Alpha-Me R-azide 1,4 triazole (6 carbon) alanine olefin amino acid connected by an all-carbon crosslinker comprising one double bond
  misc_feature (4)..(11): Crosslink between residues
  MOD_RES (11)..(11): Alpha-Me alkyne 1,4 triazole (5 carbon) alanine olefin amino acid connected by an all-carbon crosslinker comprising one double bond
  MOD_RES (15)..(15): D-amino acid
  C-term NH2
LTFAAEWAQLAAAIA

SEQ ID NO: 1666 - protein, 15 aa, Artificial Sequence
  Description of Artificial Sequence: Synthetic peptide
  N-term Ac
  MOD_RES (4)..(4): Alpha-Me R-azide 1,4 triazole (6 carbon) alanine olefin amino acid connected by an all-carbon crosslinker comprising one double bond
  misc_feature (4)..(11): Crosslink between residues
  MOD_RES (6)..(6): 4-carboxy-Phe
  MOD_RES (11)..(11): Alpha-Me alkyne 1,4 triazole (5 carbon) alanine olefin amino acid connected by an all-carbon crosslinker comprising one double bond
  MOD_RES (15)..(15): D-amino acid
  C-term NH2
LTFAAFWAQLAAAIA

SEQ ID NO: 1667 - protein, 15 aa, Artificial Sequence
  Description of Artificial Sequence: Synthetic peptide
  N-term Ac
  MOD_RES (4)..(4): Alpha-Me R-azide 1,4 triazole (6 carbon) alanine olefin amino acid connected by an all-carbon crosslinker comprising one double bond
  misc_feature (4)..(11): Crosslink between residues
  MOD_RES (6)..(6): 4-carboxy-Phe
  MOD_RES (11)..(11): Alpha-Me alkyne 1,4 triazole (5 carbon) alanine olefin amino acid connected by an all-carbon crosslinker comprising one double bond
  MOD_RES (15)..(15): D-amino acid
  C-term NH2
LTFAAFWAQLAAAIA

SEQ ID NO: 1668 - protein, 15 aa, Artificial Sequence
  Description of Artificial Sequence: Synthetic peptide
  N-term Ac
  MOD_RES (4)..(4): Alpha-Me R-azide 1,4 triazole (6 carbon) alanine olefin amino acid connected by an all-carbon crosslinker comprising one double bond
  misc_feature (4)..(11): Crosslink between residues
  MOD_RES (11)..(11): Alpha-Me alkyne 1,4 triazole (5 carbon) alanine olefin amino acid connected by an all-carbon crosslinker comprising one double bond
  C-term NH2
LTFAAHWAQLAAHFA

SEQ ID NO: 1669 - protein, 15 aa, Artificial Sequence
  Description of Artificial Sequence: Synthetic peptide
  N-term Ac
  MOD_RES (4)..(4): Alpha-Me R-azide 1,4 triazole (6 carbon) alanine olefin amino acid connected by an all-carbon crosslinker comprising one double bond
  misc_feature (4)..(11): Crosslink between residues
  MOD_RES (11)..(11): Alpha-Me alkyne 1,4 triazole (5 carbon) alanine olefin amino acid connected by an all-carbon crosslinker comprising one double bond
  C-term NH2
ITFAFYWAQLAAHFA

SEQ ID NO: 1670 - protein, 15 aa, Artificial Sequence
  Description of Artificial Sequence: Synthetic peptide
  N-term Ac
  MOD_RES (4)..(4): Alpha-Me R-azide 1,4 triazole (6 carbon) alanine olefin amino acid connected by an all-carbon crosslinker comprising one double bond
  misc_feature (4)..(11): Crosslink between residues
  MOD_RES (11)..(11): Alpha-Me alkyne 1,4 triazole (5 carbon) alanine olefin amino acid connected by an all-carbon crosslinker comprising one double bond
  C-term NH2
ITFAFYWAQLAAHFA

SEQ ID NO: 1671 - protein, 15 aa, Artificial Sequence
  Description of Artificial Sequence: Synthetic peptide
  N-term Ac
  MOD_RES (4)..(4): Alpha-Me R-azide 1,4 triazole (6 carbon) alanine olefin amino acid connected by an all-carbon crosslinker comprising one double bond
  misc_feature (4)..(11): Crosslink between residues
  MOD_RES (11)..(11): Alpha-Me alkyne 1,4 triazole (5 carbon) alanine olefin amino acid connected by an all-carbon crosslinker comprising one double bond
  C-term NH2
ITFAFHWAQLAAEFA

SEQ ID NO: 1672 - protein, 15 aa, Artificial Sequence
  Description of Artificial Sequence: Synthetic peptide
  N-term Ac
  MOD_RES (4)..(4): Alpha-Me R-azide 1,4 triazole (6 carbon) alanine olefin amino acid connected by an all-carbon crosslinker comprising one double bond
  misc_feature (4)..(11): Crosslink between residues
  MOD_RES (11)..(11): Alpha-Me alkyne 1,4 triazole (5 carbon) alanine olefin amino acid connected by an all-carbon crosslinker comprising one double bond
  C-term NH2
ITFAFHWAQLAAEFA

SEQ ID NO: 1673 - protein, 15 aa, Artificial Sequence
  Description of Artificial Sequence: Synthetic peptide
  N-term Ac
  MOD_RES (4)..(4): Alpha-Me R-azide 1,4 triazole (6 carbon) alanine olefin amino acid connected by an all-carbon crosslinker comprising one double bond
  misc_feature (4)..(11): Crosslink between residues
  MOD_RES (11)..(11): Alpha-Me alkyne 1,4 triazole (5 carbon) alanine olefin amino acid connected by an all-carbon crosslinker comprising one double bond
  C-term NH2
ITFAEHWAQLAAHFA

SEQ ID NO: 1674 - protein, 15 aa, Artificial Sequence
  Description of Artificial Sequence: Synthetic peptide
  N-term Ac
  MOD_RES (4)..(4): Alpha-Me R-azide 1,4 triazole (6 carbon) alanine olefin amino acid connected by an all-carbon crosslinker comprising one double bond
  misc_feature (4)..(11): Crosslink between residues
  MOD_RES (11)..(11): Alpha-Me alkyne 1,4 triazole (5 carbon) alanine olefin amino acid connected by an all-carbon crosslinker comprising one double bond
  C-term NH2
ITFAEHWAQLAAHFA

SEQ ID NO: 1675 - protein, 15 aa, Artificial Sequence
  Description of Artificial Sequence: Synthetic peptide
  N-term Ac
  MOD_RES (4)..(4): Alpha-Me R-azide 1,4 triazole (6 carbon) alanine olefin amino acid connected by an all-carbon crosslinker comprising one double bond
  misc_feature (4)..(11): Crosslink between residues
  MOD_RES (11)..(11): Alpha-Me alkyne 1,4 triazole (5 carbon) alanine olefin amino acid connected by an all-carbon crosslinker comprising one double bond
  C-term NH2
LTFAAHWVQLAAHFA

SEQ ID NO: 1676 - protein, 15 aa, Artificial Sequence
  Description of Artificial Sequence: Synthetic peptide
  N-term Ac
  MOD_RES (4)..(4): Alpha-Me R-azide 1,4 triazole (6 carbon) alanine olefin amino acid connected by an all-carbon crosslinker comprising one double bond
  misc_feature (4)..(11): Crosslink between residues
  MOD_RES (11)..(11): Alpha-Me alkyne 1,4 triazole (5 carbon) alanine olefin amino acid connected by an all-carbon crosslinker comprising one double bond
  C-term NH2
ITFAFYWVQLAAHFA

SEQ ID NO: 1677 - protein, 15 aa, Artificial Sequence
  Description of Artificial Sequence: Synthetic peptide
  N-term Ac
  MOD_RES (4)..(4): Alpha-Me R-azide 1,4 triazole (6 carbon) alanine olefin amino acid connected by an all-carbon crosslinker comprising one double bond
  misc_feature (4)..(11): Crosslink between residues
  MOD_RES (11)..(11): Alpha-Me alkyne 1,4 triazole (5 carbon) alanine olefin amino acid connected by an all-carbon crosslinker comprising one double bond
  C-term NH2
ITFAEYWVQLAAHFA

SEQ ID NO: 1678 - protein, 15 aa, Artificial Sequence
  Description of Artificial Sequence: Synthetic peptide
  N-term Ac
  MOD_RES (4)..(4): Alpha-Me R-azide 1,4 triazole (6 carbon) alanine olefin amino acid connected by an all-carbon crosslinker comprising one double bond
  misc_feature (4)..(11): Crosslink between residues
  MOD_RES (11)..(11): Alpha-Me alkyne 1,4 triazole (5 carbon) alanine olefin amino acid connected by an all-carbon crosslinker comprising one double bond
  C-term NH2
ITFAEHWVQLAAHFA

SEQ ID NO: 1679 - protein, 15 aa, Artificial Sequence
  Description of Artificial Sequence: Synthetic peptide
  N-term Ac
  MOD_RES (4)..(4): Alpha-Me R-azide 1,4 triazole (6 carbon) alanine olefin amino acid connected by an all-carbon crosslinker comprising one double bond
  misc_feature (4)..(11): Crosslink between residues
  MOD_RES (11)..(11): Alpha-Me alkyne 1,4 triazole (5 carbon) alanine olefin amino acid connected by an all-carbon crosslinker comprising one double bond
  C-term NH2
ITFAEHWVQLAAHFA

SEQ ID NO: 1680 - protein, 14 aa, Artificial Sequence
  Description of Artificial Sequence: Synthetic peptide
  N-term Ac
  MOD_RES (4)..(4): Alpha-Me R-azide 1,4 triazole (6 carbon) alanine olefin amino acid connected by an all-carbon crosslinker comprising one double bond
  misc_feature (4)..(11): Crosslink between residues
  MOD_RES (11)..(11): Alpha-Me alkyne 1,4 triazole (5 carbon) alanine olefin amino acid connected by an all-carbon crosslinker comprising one double bond
  C-term NH2
ETFAEYWAALASAA

SEQ ID NO: 1681 - protein, 14 aa, Artificial Sequence
  Description of Artificial Sequence: Synthetic peptide
  N-term Ac
  MOD_RES (4)..(4): Alpha-Me R-azide 1,4 triazole (6 carbon) alanine olefin amino acid connected by an all-carbon crosslinker comprising one double bond
  misc_feature (4)..(11): Crosslink between residues
  MOD_RES (11)..(11): Alpha-Me alkyne 1,4 triazole (5 carbon) alanine olefin amino acid connected by an all-carbon crosslinker comprising one double bond
  C-term NH2
LTFAAYWVALASAA

SEQ ID NO: 1682 - protein, 14 aa, Artificial Sequence
  Description of Artificial Sequence: Synthetic peptide
  N-term Ac
  MOD_RES (4)..(4): Alpha-Me R-azide 1,4 triazole (6 carbon) alanine olefin amino acid connected by an all-carbon crosslinker comprising one double bond
  misc_feature (4)..(11): Crosslink between residues
  MOD_RES (11)..(11): Alpha-Me alkyne 1,4 triazole (5 carbon) alanine olefin amino acid connected by an all-carbon crosslinker comprising one double bond
  C-term NH2
LTFAAHWAALASAA

SEQ ID NO: 1683 - protein, 14 aa, Artificial Sequence
  Description of Artificial Sequence: Synthetic peptide
  N-term Ac
  MOD_RES (4)..(4): Alpha-Me R-azide 1,4 triazole (6 carbon) alanine olefin amino acid connected by an all-carbon crosslinker comprising one double bond
  misc_feature (4)..(11): Crosslink between residues
  MOD_RES (11)..(11): Alpha-Me alkyne 1,4 triazole (5 carbon) alanine olefin amino acid connected by an all-carbon crosslinker comprising one double bond
  C-term NH2
LTFAAEWAALASAA

SEQ ID NO: 1684 - protein, 14 aa, Artificial Sequence
  Description of Artificial Sequence: Synthetic peptide
  N-term Ac
  MOD_RES (4)..(4): Alpha-Me R-azide 1,4 triazole (6 carbon) alanine olefin amino acid connected by an all-carbon crosslinker comprising one double bond
  misc_feature (4)..(11): Crosslink between residues
  MOD_RES (11)..(11): Alpha-Me alkyne 1,4 triazole (5 carbon) alanine olefin amino acid connected by an all-carbon crosslinker comprising one double bond
  C-term NH2
LTFAAEWAALASAA

SEQ ID NO: 1685 - protein, 14 aa, Artificial Sequence
  Description of Artificial Sequence: Synthetic peptide
  N-term Ac
  MOD_RES (4)..(4): Alpha-Me R-azide 1,4 triazole (6 carbon) alanine olefin amino acid connected by an all-carbon crosslinker comprising one double bond
  misc_feature (4)..(11): Crosslink between residues
  MOD_RES (11)..(11): Alpha-Me alkyne 1,4 triazole (5 carbon) alanine olefin amino acid connected by an all-carbon crosslinker comprising one double bond
  C-term NH2
LTFAASWAALASAA

SEQ ID NO: 1686 - protein, 14 aa, Artificial Sequence
  Description of Artificial Sequence: Synthetic peptide
  N-term Ac
  MOD_RES (4)..(4): Alpha-Me R-azide 1,4 triazole (6 carbon) alanine olefin amino acid connected by an all-carbon crosslinker comprising one double bond
  misc_feature (4)..(11): Crosslink between residues
  MOD_RES (11)..(11): Alpha-Me alkyne 1,4 triazole (5 carbon) alanine olefin amino acid connected by an all-carbon crosslinker comprising one double bond
  C-term NH2
LTFAASWAALASAA

SEQ ID NO: 1687 - protein, 15 aa, Artificial Sequence
  Description of Artificial Sequence: Synthetic peptide
  N-term Ac
  MOD_RES (4)..(4): Alpha-Me R-azide 1,4 triazole (6 carbon) alanine olefin amino acid connected by an all-carbon crosslinker comprising one double bond
  misc_feature (4)..(11): Crosslink between residues
  MOD_RES (11)..(11): Alpha-Me alkyne 1,4 triazole (5 carbon) alanine olefin amino acid connected by an all-carbon crosslinker comprising one double bond
  MOD_RES (15)..(15): D-amino acid
  C-term NH2
LTFAAYWAALAAAIA

SEQ ID NO: 1688 - protein, 15 aa, Artificial Sequence
  Description of Artificial Sequence: Synthetic peptide
  N-term Ac
  MOD_RES (4)..(4): Alpha-Me R-azide 1,4 triazole (6 carbon) alanine olefin amino acid connected by an all-carbon crosslinker comprising one double bond
  misc_feature (4)..(11): Crosslink between residues
  MOD_RES (11)..(11): Alpha-Me alkyne 1,4 triazole (5 carbon) alanine olefin amino acid connected by an all-carbon crosslinker comprising one double bond
  MOD_RES (15)..(15): D-amino acid
  C-term NH2
LTFAAYWAALAAAIA

SEQ ID NO: 1689 - protein, 15 aa, Artificial Sequence
  Description of Artificial Sequence: Synthetic peptide
  N-term Ac
  MOD_RES (4)..(4): Alpha-Me R-azide 1,4 triazole (6 carbon) alanine olefin amino acid connected by an all-carbon crosslinker comprising one double bond
  misc_feature (4)..(11): Crosslink between residues
  MOD_RES (11)..(11): Alpha-Me alkyne 1,4 triazole (5 carbon) alanine olefin amino acid connected by an all-carbon crosslinker comprising one double bond
  C-term NH2
LTFAAYWAALAAHFA

SEQ ID NO: 1690 - protein, 15 aa, Artificial Sequence
  Description of Artificial Sequence: Synthetic peptide
  N-term Ac
  MOD_RES (4)..(4): Alpha-Me R-azide 1,4 triazole (6 carbon) alanine olefin amino acid connected by an all-carbon crosslinker comprising one double bond
  misc_feature (4)..(11): Crosslink between residues
  MOD_RES (11)..(11): Alpha-Me alkyne 1,4 triazole (5 carbon) alanine olefin amino acid connected by an all-carbon crosslinker comprising one double bond
  MOD_RES (15)..(15): D-amino acid
  C-term NH2
LTFAEHWAQLAAHIA

SEQ ID NO: 1691 - protein, 15 aa, Artificial Sequence
  Description of Artificial Sequence: Synthetic peptide
  N-term Ac
  MOD_RES (4)..(4): Alpha-Me R-azide 1,4 triazole (6 carbon) alanine olefin amino acid connected by an all-carbon crosslinker comprising one double bond
  misc_feature (4)..(11): Crosslink between residues
  MOD_RES (11)..(11): Alpha-Me alkyne 1,4 triazole (5 carbon) alanine olefin amino acid connected by an all-carbon crosslinker comprising one double bond
  MOD_RES (15)..(15): D-amino acid
  C-term NH2
LTFAEHWAQLAAHIA

SEQ ID NO: 1692 - protein, 15 aa, Artificial Sequence
  Description of Artificial Sequence: Synthetic peptide
  N-term Ac
  MOD_RES (4)..(4): Alpha-Me R-azide 1,4 triazole (6 carbon) alanine olefin amino acid connected by an all-carbon crosslinker comprising one double bond
  misc_feature (4)..(11): Crosslink between residues
  MOD_RES (11)..(11): Alpha-Me alkyne 1,4 triazole (5 carbon) alanine olefin amino acid connected by an all-carbon crosslinker comprising one double bond
  MOD_RES (15)..(15): D-amino acid
  C-term NH2
LTFAAHWAQLAAHIA

SEQ ID NO: 1693 - protein, 15 aa, Artificial Sequence
  Description of Artificial Sequence: Synthetic peptide
  N-term Ac
  MOD_RES (4)..(4): Alpha-Me R-azide 1,4 triazole (6 carbon) alanine olefin amino acid connected by an all-carbon crosslinker comprising one double bond
  misc_feature (4)..(11): Crosslink between residues
  MOD_RES (11)..(11): Alpha-Me alkyne 1,4 triazole (5 carbon) alanine olefin amino acid connected by an all-carbon crosslinker comprising one double bond
  MOD_RES (15)..(15): D-amino acid
  C-term NH2
LTFAEYWAQLAAHIA

SEQ ID NO: 1694 - protein, 15 aa, Artificial Sequence
  Description of Artificial Sequence: Synthetic peptide
  N-term Ac
  MOD_RES (4)..(4): Alpha-Me R-azide 1,4 triazole (6 carbon) alanine olefin amino acid connected by an all-carbon crosslinker comprising one double bond
  misc_feature (4)..(11): Crosslink between residues
  MOD_RES (11)..(11): Alpha-Me alkyne 1,4 triazole (5 carbon) alanine olefin amino acid connected by an all-carbon crosslinker comprising one double bond
  MOD_RES (15)..(15): D-amino acid
  C-term NH2
LTFAAYWAQLAAAFA

SEQ ID NO: 1695 - protein, 15 aa, Artificial Sequence
  Description of Artificial Sequence: Synthetic peptide
  N-term Ac
  MOD_RES (4)..(4): Alpha-Me R-azide 1,4 triazole (6 carbon) alanine olefin amino acid connected by an all-carbon crosslinker comprising one double bond
  misc_feature (4)..(11): Crosslink between residues
  MOD_RES (11)..(11): Alpha-Me alkyne 1,4 triazole (5 carbon) alanine olefin amino acid connected by an all-carbon crosslinker comprising one double bond
  MOD_RES (15)..(15): D-amino acid
  C-term NH2
LTFAAYWAQLAAAFA

SEQ ID NO: 1696 - protein, 15 aa, Artificial Sequence
  Description of Artificial Sequence: Synthetic peptide
  N-term Ac
  MOD_RES (4)..(4): Alpha-Me R-azide 1,4 triazole (6 carbon) alanine olefin amino acid connected by an all-carbon crosslinker comprising one double bond
  misc_feature (4)..(11): Crosslink between residues
  MOD_RES (11)..(11): Alpha-Me alkyne 1,4 triazole (5 carbon) alanine olefin amino acid connected by an all-carbon crosslinker comprising one double bond
  MOD_RES (15)..(15): D-amino acid
  C-term NH2
LTFAAYWAQLAAAWA

SEQ ID NO: 1697 - protein, 15 aa, Artificial Sequence
  Description of Artificial Sequence: Synthetic peptide
  N-term Ac
  MOD_RES (4)..(4): Alpha-Me R-azide 1,4 triazole (6 carbon) alanine olefin amino acid connected by an all-carbon crosslinker comprising one double bond
  misc_feature (4)..(11): Crosslink between residues
  MOD_RES (11)..(11): Alpha-Me alkyne 1,4 triazole (5 carbon) alanine olefin amino acid connected by an all-carbon crosslinker comprising one double bond
  MOD_RES (15)..(15): D-amino acid
  C-term NH2
LTFAAYWAQLAAAVA

SEQ ID NO: 1698 - protein, 15 aa, Artificial Sequence
  Description of Artificial Sequence: Synthetic peptide
  N-term Ac
  MOD_RES (4)..(4): Alpha-Me R-azide 1,4 triazole (6 carbon) alanine olefin amino acid connected by an all-carbon crosslinker comprising one double bond
  misc_feature (4)..(11): Crosslink between residues
  MOD_RES (11)..(11): Alpha-Me alkyne 1,4 triazole (5 carbon) alanine olefin amino acid connected by an all-carbon crosslinker comprising one double bond
  MOD_RES (15)..(15): D-amino acid
  C-term NH2
LTFAAYWAQLAAAVA

SEQ ID NO: 1699 - protein, 15 aa, Artificial Sequence
  Description of Artificial Sequence: Synthetic peptide
  N-term Ac
  MOD_RES (4)..(4): Alpha-Me R-azide 1,4 triazole (6 carbon) alanine olefin amino acid connected by an all-carbon crosslinker comprising one double bond
  misc_feature (4)..(11): Crosslink between residues
  MOD_RES (11)..(11): Alpha-Me alkyne 1,4 triazole (5 carbon) alanine olefin amino acid connected by an all-carbon crosslinker comprising one double bond
  MOD_RES (15)..(15): D-amino acid
  C-term NH2
LTFAAYWAQLAAALA

SEQ ID NO: 1700 - protein, 15 aa, Artificial Sequence
  Description of Artificial Sequence: Synthetic peptide
  N-term Ac
  MOD_RES (4)..(4): Alpha-Me R-azide 1,4 triazole (6 carbon) alanine olefin amino acid connected by an all-carbon crosslinker comprising one double bond
  misc_feature (4)..(11): Crosslink between residues
  MOD_RES (11)..(11): Alpha-Me alkyne 1,4 triazole (5 carbon) alanine olefin amino acid connected by an all-carbon crosslinker comprising one double bond
  MOD_RES (15)..(15): D-amino acid
  C-term NH2
LTFAAYWAQLAAALA

SEQ ID NO: 1701 - protein, 15 aa, Artificial Sequence
  Description of Artificial Sequence: Synthetic peptide
  N-term Ac
  MOD_RES (4)..(4): Alpha-Me R-azide 1,4 triazole (6 carbon) alanine olefin amino acid connected by an all-carbon crosslinker comprising one double bond
  misc_feature (4)..(11): Crosslink between residues
  MOD_RES (11)..(11): Alpha-Me alkyne 1,4 triazole (5 carbon) alanine olefin amino acid connected by an all-carbon crosslinker comprising one double bond
  MOD_RES (15)..(15): D-amino acid
  C-term NH2
LTFAEYWAQLAAAIA

SEQ ID NO: 1702 - protein, 15 aa, Artificial Sequence
  Description of Artificial Sequence: Synthetic peptide
  N-term Ac
  MOD_RES (4)..(4): Alpha-Me R-azide 1,4 triazole (6 carbon) alanine olefin amino acid connected by an all-carbon crosslinker comprising one double bond
  misc_feature (4)..(11): Crosslink between residues
  MOD_RES (11)..(11): Alpha-Me alkyne 1,4 triazole (5 carbon) alanine olefin amino acid connected by an all-carbon crosslinker comprising one double bond
  MOD_RES (15)..(15): D-amino acid
  C-term NH2
LTFAEYWAQLAAAIA

SEQ ID NO: 1703 - protein, 15 aa, Artificial Sequence
  Description of Artificial Sequence: Synthetic peptide
  N-term Ac
  MOD_RES (4)..(4): Alpha-Me R-azide 1,4 triazole (6 carbon) alanine olefin amino acid connected by an all-carbon crosslinker comprising one double bond
  misc_feature (4)..(11): Crosslink between residues
  MOD_RES (11)..(11): Alpha-Me alkyne 1,4 triazole (5 carbon) alanine olefin amino acid connected by an all-carbon crosslinker comprising one double bond
  MOD_RES (15)..(15): D-amino acid
  C-term NH2
LTFAEYWAQLAAAFA

SEQ ID NO: 1704 - protein, 15 aa, Artificial Sequence
  Description of Artificial Sequence: Synthetic peptide
  N-term Ac
  MOD_RES (4)..(4): Alpha-Me R-azide 1,4 triazole (6 carbon) alanine olefin amino acid connected by an all-carbon crosslinker comprising one double bond
  misc_feature (4)..(11): Crosslink between residues
  MOD_RES (11)..(11): Alpha-Me alkyne 1,4 triazole (5 carbon) alanine olefin amino acid connected by an all-carbon crosslinker comprising one double bond
  MOD_RES (15)..(15): D-amino acid
  C-term NH2
LTFAEYWAQLAAAFA

SEQ ID NO: 1705 - protein, 15 aa, Artificial Sequence
  Description of Artificial Sequence: Synthetic peptide
  N-term Ac
  MOD_RES (4)..(4): Alpha-Me R-azide 1,4 triazole (6 carbon) alanine olefin amino acid connected by an all-carbon crosslinker comprising one double bond
  misc_feature (4)..(11): Crosslink between residues
  MOD_RES (11)..(11): Alpha-Me alkyne 1,4 triazole (5 carbon) alanine olefin amino acid connected by an all-carbon crosslinker comprising one double bond
  MOD_RES (15)..(15): D-amino acid
  C-term NH2
LTFAEYWAQLAAAVA

SEQ ID NO: 1706 - protein, 15 aa, Artificial Sequence
  Description of Artificial Sequence: Synthetic peptide
  N-term Ac
  MOD_RES (4)..(4): Alpha-Me R-azide 1,4 triazole (6 carbon) alanine olefin amino acid connected by an all-carbon crosslinker comprising one double bond
  misc_feature (4)..(11): Crosslink between residues
  MOD_RES (11)..(11): Alpha-Me alkyne 1,4 triazole (5 carbon) alanine olefin amino acid connected by an all-carbon crosslinker comprising one double bond
  MOD_RES (15)..(15): D-amino acid
  C-term NH2
LTFAEYWAQLAAAVA

SEQ ID NO: 1707 - protein, 15 aa, Artificial Sequence
  Description of Artificial Sequence: Synthetic peptide
  N-term Ac
  MOD_RES (4)..(4): Alpha-Me R-azide 1,4 triazole (6 carbon) alanine olefin amino acid connected by an all-carbon crosslinker comprising one double bond
  misc_feature (4)..(11): Crosslink between residues
  MOD_RES (11)..(11): Alpha-Me alkyne 1,4 triazole (5 carbon) alanine olefin amino acid connected by an all-carbon crosslinker comprising one double bond
  MOD_RES (15)..(15): D-amino acid
  C-term NH2
LTFAEHWAQLAAAIA

SEQ ID NO: 1708 - protein, 15 aa, Artificial Sequence
  Description of Artificial Sequence: Synthetic peptide
  N-term Ac
  MOD_RES (4)..(4): Alpha-Me R-azide 1,4 triazole (6 carbon) alanine olefin amino acid connected by an all-carbon crosslinker comprising one double bond
  misc_feature (4)..(11): Crosslink between residues
  MOD_RES (11)..(11): Alpha-Me alkyne 1,4 triazole (5 carbon) alanine olefin amino acid connected by an all-carbon crosslinker comprising one double bond
  MOD_RES (15)..(15): D-amino acid
  C-term NH2
LTFAEHWAQLAAAIA

SEQ ID NO: 1709 - protein, 15 aa, Artificial Sequence
  Description of Artificial Sequence: Synthetic peptide
  N-term Ac
  MOD_RES (4)..(4): Alpha-Me R-azide 1,4 triazole (6 carbon) alanine olefin amino acid connected by an all-carbon crosslinker comprising one double bond
  misc_feature (4)..(11): Crosslink between residues
  MOD_RES (11)..(11): Alpha-Me alkyne 1,4 triazole (5 carbon) alanine olefin amino acid connected by an all-carbon crosslinker comprising one double bond
  MOD_RES (15)..(15): D-amino acid
  C-term NH2
LTFAEHWAQLAAAWA

SEQ ID NO: 1710 - protein, 15 aa, Artificial Sequence
  Description of Artificial Sequence: Synthetic peptide
  N-term Ac
  MOD_RES (4)..(4): Alpha-Me R-azide 1,4 triazole (6 carbon) alanine olefin amino acid connected by an all-carbon crosslinker comprising one double bond
  misc_feature (4)..(11): Crosslink between residues
  MOD_RES (11)..(11): Alpha-Me alkyne 1,4 triazole (5 carbon) alanine olefin amino acid connected by an all-carbon crosslinker comprising one double bond
  MOD_RES (15)..(15): D-amino acid
  C-term NH2
LTFAEHWAQLAAAWA

SEQ ID NO: 1711 - protein, 15 aa, Artificial Sequence
  Description of Artificial Sequence: Synthetic peptide
  N-term Ac
  MOD_RES (4)..(4): Alpha-Me R-azide 1,4 triazole (6 carbon) alanine olefin amino acid connected by an all-carbon crosslinker comprising one double bond
  misc_feature (4)..(11): Crosslink between residues
  MOD_RES (11)..(11): Alpha-Me alkyne 1,4 triazole (5 carbon) alanine olefin amino acid connected by an all-carbon crosslinker comprising one double bond
  MOD_RES (15)..(15): D-amino acid
  C-term NH2
LTFAEHWAQLAAALA

SEQ ID NO: 1712 - protein, 15 aa, Artificial Sequence
  Description of Artificial Sequence: Synthetic peptide
  N-term Ac
  MOD_RES (4)..(4): Alpha-Me R-azide 1,4 triazole (6 carbon) alanine olefin amino acid connected by an all-carbon crosslinker comprising one double bond
  misc_feature (4)..(11): Crosslink between residues
  MOD_RES (11)..(11): Alpha-Me alkyne 1,4 triazole (5 carbon) alanine olefin amino acid connected by an all-carbon crosslinker comprising one double bond
  MOD_RES (15)..(15): D-amino acid
  C-term NH2
LTFAEHWAQLAAALA

SEQ ID NO: 1713 - protein, 15 aa, Artificial Sequence
  Description of Artificial Sequence: Synthetic peptide
  N-term Ac
  MOD_RES (4)..(4): Alpha-Me R-azide 1,4 triazole (6 carbon) alanine olefin amino acid connected by an all-carbon crosslinker comprising one double bond
  misc_feature (4)..(11): Crosslink between residues
  MOD_RES (11)..(11): Alpha-Me alkyne 1,4 triazole (5 carbon) alanine olefin amino acid connected by an all-carbon crosslinker comprising one double bond
  MOD_RES (15)..(15): D-amino acid
  C-term NH2
ETFAEHWVQLAAALA

SEQ ID NO: 1714 - protein, 15 aa, Artificial Sequence
  Description of Artificial Sequence: Synthetic peptide
  N-term Ac
  MOD_RES (4)..(4): Alpha-Me R-azide 1,4 triazole (6 carbon) alanine olefin amino acid connected by an all-carbon crosslinker comprising one double bond
  misc_feature (4)..(11): Crosslink between residues
  MOD_RES (11)..(11): Alpha-Me alkyne 1,4 triazole (5 carbon) alanine olefin amino acid connected by an all-carbon crosslinker comprising one double bond
  MOD_RES (15)..(15): D-amino acid
  C-term NH2
LTFAAYWAQLAAAAA

SEQ ID NO: 1715 - protein, 15 aa, Artificial Sequence
  Description of Artificial Sequence: Synthetic peptide
  N-term Ac
  MOD_RES (4)..(4): Alpha-Me R-azide 1,4 triazole (6 carbon) alanine olefin amino acid connected by an all-carbon crosslinker comprising one double bond
  misc_feature (4)..(11): Crosslink between residues
  MOD_RES (11)..(11): Alpha-Me alkyne 1,4 triazole (5 carbon) alanine olefin amino acid connected by an all-carbon crosslinker comprising one double bond
  MOD_RES (15)..(15): D-amino acid
  C-term NH2
LTFAAYWAQLAAAAA

SEQ ID NO: 1716 - protein, 15 aa, Artificial Sequence
  Description of Artificial Sequence: Synthetic peptide
  N-term Ac
  MOD_RES (4)..(4): Alpha-Me R-azide 1,4 triazole (6 carbon) alanine olefin amino acid connected by an all-carbon crosslinker comprising one double bond
  misc_feature (4)..(11): Crosslink between residues
  MOD_RES (11)..(11): Alpha-Me alkyne 1,4 triazole (5 carbon) alanine olefin amino acid connected by an all-carbon crosslinker comprising one double bond
  MOD_RES (14)..(14): 2-aminoisobutyric acid
  C-term NH2
LTFAAYWAQLAAAXA

SEQ ID NO: 1717 - protein, 15 aa, Artificial Sequence
  Description of Artificial Sequence: Synthetic peptide
  N-term Ac
  MOD_RES (4)..(4): Alpha-Me R-azide 1,4 triazole (6 carbon) alanine olefin amino acid connected by an all-carbon crosslinker comprising one double bond
  misc_feature (4)..(11): Crosslink between residues
  MOD_RES (11)..(11): Alpha-Me alkyne 1,4 triazole (5 carbon) alanine olefin amino acid connected by an all-carbon crosslinker comprising one double bond
  MOD_RES (14)..(14): 2-aminoisobutyric acid
  C-term NH2
LTFAAYWAQLAAAXA

SEQ ID NO: 1718 - protein, 16 aa, Artificial Sequence
  Description of Artificial Sequence: Synthetic peptide
  N-term Ac
  MOD_RES (4)..(4): Alpha-Me R-azide 1,4 triazole (6 carbon) alanine olefin amino acid connected by an all-carbon crosslinker comprising one double bond
  misc_feature (4)..(11): Crosslink between residues
  MOD_RES (11)..(11): Alpha-Me alkyne 1,4 triazole (5 carbon) alanine olefin amino acid connected by an all-carbon crosslinker comprising one double bond
  MOD_RES (16)..(16): D-amino acid
  C-term NH2
LTFAAYWAQLAAAAAA

SEQ ID NO: 1719 - protein, 15 aa, Artificial Sequence
  Description of Artificial Sequence: Synthetic peptide
  N-term Ac
  MOD_RES (4)..(4): Alpha-Me R5-pentenyl-alanine olefin amino acids connected by an all-carbon crosslinker comprising one double bond
  misc_feature (4)..(11): Crosslink between residues
  MOD_RES (11)..(11): Alpha-Me alkyne 1,4 triazole (5 carbon) alanine olefin amino acid connected by an all-carbon crosslinker comprising one double bonds8
  MOD_RES (15)..(15): D-amino acid
  C-term NH2
LTFAAYWAQLAAAIA

SEQ ID NO: 1720 - protein, 14 aa, Artificial Sequence
  Description of Artificial Sequence: Synthetic peptide
  N-term Ac
  MOD_RES (4)..(4): Alpha-Me R5-pentenyl-alanine olefin amino acids connected by an all-carbon crosslinker comprising one double bond
  misc_feature (4)..(11): Crosslink between residues
  MOD_RES (11)..(11): Alpha-Me alkyne 1,4 triazole (5 carbon) alanine olefin amino acid connected by an all-carbon crosslinker comprising one double bonds8
  C-term NH2
LTFAAYWAQLASAA

SEQ ID NO: 1721 - protein, 15 aa, Artificial Sequence
  Description of Artificial Sequence: Synthetic peptide
  N-term Ac
  MOD_RES (4)..(4): Alpha-Me R-azide 1,4 triazole (6 carbon) alanine olefin amino acid connected by an all-carbon crosslinker comprising one double bond
  misc_feature (4)..(11): Crosslink between residues
  MOD_RES (10)..(10): Cyclobutyl-Ala
  MOD_RES (11)..(11): Alpha-Me alkyne 1,4 triazole (5 carbon) alanine olefin amino acid connected by an all-carbon crosslinker comprising one double bond
  MOD_RES (14)..(14): Norleucine
  C-term NH2
LTFAAYWAQAAAALA

SEQ ID NO: 1722 - protein, 15 aa, Artificial Sequence
  Description of Artificial Sequence: Synthetic peptide
  N-term Ac
  MOD_RES (4)..(4): Alpha-Me R-azide 1,4 triazole (6 carbon) alanine olefin amino acid connected by an all-carbon crosslinker comprising one double bond
  misc_feature (4)..(11): Crosslink between residues
  MOD_RES (10)..(10): Cyclobutyl-Ala
  MOD_RES (11)..(11): Alpha-Me alkyne 1,4 triazole (5 carbon) alanine olefin amino acid connected by an all-carbon crosslinker comprising one double bond
  MOD_RES (14)..(14): Norleucine
  C-term NH2
ETFAAYWAQAAAALA

SEQ ID NO: 1723 - protein, 15 aa, Artificial Sequence
  Description of Artificial Sequence: Synthetic peptide
  N-term Ac
  MOD_RES (4)..(4): Alpha-Me R-azide 1,4 triazole (6 carbon) alanine olefin amino acid connected by an all-carbon crosslinker comprising one double bond
  misc_feature (4)..(11): Crosslink between residues
  MOD_RES (10)..(10): Cyclobutyl-Ala
  MOD_RES (11)..(11): Alpha-Me alkyne 1,4 triazole (5 carbon) alanine olefin amino acid connected by an all-carbon crosslinker comprising one double bond
  MOD_RES (14)..(14): Norleucine
  C-term NH2
LTFAEYWAQAAAALA

SEQ ID NO: 1724 - protein, 15 aa, Artificial Sequence
  Description of Artificial Sequence: Synthetic peptide
  N-term Ac
  MOD_RES (4)..(4): Alpha-Me R-azide 1,4 triazole (6 carbon) alanine olefin amino acid connected by an all-carbon crosslinker comprising one double bond
  misc_feature (4)..(11): Crosslink between residues
  MOD_RES (10)..(10): Cyclobutyl-Ala
  MOD_RES (11)..(11): Alpha-Me alkyne 1,4 triazole (5 carbon) alanine olefin amino acid connected by an all-carbon crosslinker comprising one double bond
  MOD_RES (14)..(14): Norleucine
  C-term NH2
LTFAAYWAQAAAWLA

SEQ ID NO: 1725 - protein, 15 aa, Artificial Sequence
  Description of Artificial Sequence: Synthetic peptide
  N-term Ac
  MOD_RES (4)..(4): Alpha-Me R-azide 1,4 triazole (6 carbon) alanine olefin amino acid connected by an all-carbon crosslinker comprising one double bond
  misc_feature (4)..(11): Crosslink between residues
  MOD_RES (10)..(10): Cyclobutyl-Ala
  MOD_RES (11)..(11): Alpha-Me alkyne 1,4 triazole (5 carbon) alanine olefin amino acid connected by an all-carbon crosslinker comprising one double bond
  MOD_RES (14)..(14): Norleucine
  C-term NH2
ETFAAYWAQAAAWLA

SEQ ID NO: 1726 - protein, 15 aa, Artificial Sequence
  Description of Artificial Sequence: Synthetic peptide
  N-term Ac
  MOD_RES (4)..(4): Alpha-Me R-azide 1,4 triazole (6 carbon) alanine olefin amino acid connected by an all-carbon crosslinker comprising one double bond
  misc_feature (4)..(11): Crosslink between residues
  MOD_RES (10)..(10): Cyclobutyl-Ala
  MOD_RES (11)..(11): Alpha-Me alkyne 1,4 triazole (5 carbon) alanine olefin amino acid connected by an all-carbon crosslinker comprising one double bond
  MOD_RES (14)..(14): Norleucine
  C-term NH2
LTFAEYWAQAAAWLA

SEQ ID NO: 1727 - protein, 15 aa, Artificial Sequence
  Description of Artificial Sequence: Synthetic peptide
  N-term Ac
  MOD_RES (4)..(4): Alpha-Me R-azide 1,4 triazole (6 carbon) alanine olefin amino acid connected by an all-carbon crosslinker comprising one double bond
  misc_feature (4)..(11): Crosslink between residues
  MOD_RES (10)..(10): Cyclobutyl-Ala
  MOD_RES (11)..(11): Alpha-Me alkyne 1,4 triazole (5 carbon) alanine olefin amino acid connected by an all-carbon crosslinker comprising one double bond
  C-term NH2
LTFAEYWAQAASAFA

SEQ ID NO: 1728 - protein, 15 aa, Artificial Sequence
  Description of Artificial Sequence: Synthetic peptide
  N-term Ac
  MOD_RES (3)..(3): 3,4-difluoro-Phe
  MOD_RES (4)..(4): Alpha-Me R-azide 1,4 triazole (6 carbon) alanine olefin amino acid connected by an all-carbon crosslinker comprising one double bond
  misc_feature (4)..(11): Crosslink between residues
  MOD_RES (10)..(10): Cyclobutyl-Ala
  MOD_RES (11)..(11): Alpha-Me alkyne 1,4 triazole (5 carbon) alanine olefin amino acid connected by an all-carbon crosslinker comprising one double bond
  MOD_RES (14)..(14): Norleucine
  C-term NH2
LTFAEYWAQAASALA

SEQ ID NO: 1729 - protein, 15 aa, Artificial Sequence
  Description of Artificial Sequence: Synthetic peptide
  N-term Ac
  MOD_RES (4)..(4): Alpha-Me R-azide 1,4 triazole (6 carbon) alanine olefin amino acid connected by an all-carbon crosslinker comprising one double bond
  misc_feature (4)..(11): Crosslink between residues
  MOD_RES (6)..(6): 4-carboxy-Phe
  MOD_RES (10)..(10): Cyclobutyl-Ala
  MOD_RES (11)..(11): Alpha-Me alkyne 1,4 triazole (5 carbon) alanine olefin amino acid connected by an all-carbon crosslinker comprising one double bond
  MOD_RES (14)..(14): Norleucine
  C-term NH2
LTFAEFWAQAASALA

SEQ ID NO: 1730 - protein, 15 aa, Artificial Sequence
  Description of Artificial Sequence: Synthetic peptide
  N-term Ac
  MOD_RES (4)..(4): Alpha-Me R-azide 1,4 triazole (6 carbon) alanine olefin amino acid connected by an all-carbon crosslinker comprising one double bond
  misc_feature (4)..(11): Crosslink between residues
  MOD_RES (10)..(10): Cyclobutyl-Ala
  MOD_RES (11)..(11): Alpha-Me alkyne 1,4 triazole (5 carbon) alanine olefin amino acid connected by an all-carbon crosslinker comprising one double bond
  MOD_RES (14)..(14): Norleucine
  C-term NH2
LTFAEYWSQAASALA

SEQ ID NO: 1731 - protein, 15 aa, Artificial Sequence
  Description of Artificial Sequence: Synthetic peptide
  N-term Ac
  MOD_RES (4)..(4): Alpha-Me R-azide 1,4 triazole (6 carbon) alanine olefin amino acid connected by an all-carbon crosslinker comprising one double bond
  misc_feature (4)..(11): Crosslink between residues
  MOD_RES (10)..(10): Cyclobutyl-Ala
  MOD_RES (11)..(11): Alpha-Me alkyne 1,4 triazole (5 carbon) alanine olefin amino acid connected by an all-carbon crosslinker comprising one double bond
  MOD_RES (14)..(14): Norleucine
  C-term NH2
LTFAEYWWQAASALA

SEQ ID NO: 1732 - protein, 15 aa, Artificial Sequence
  Description of Artificial Sequence: Synthetic peptide
  N-term Ac
  MOD_RES (4)..(4): Alpha-Me R-azide 1,4 triazole (6 carbon) alanine olefin amino acid connected by an all-carbon crosslinker comprising one double bond
  misc_feature (4)..(11): Crosslink between residues
  MOD_RES (10)..(10): Cyclobutyl-Ala
  MOD_RES (11)..(11): Alpha-Me alkyne 1,4 triazole (5 carbon) alanine olefin amino acid connected by an all-carbon crosslinker comprising one double bond
  MOD_RES (15)..(15): D-amino acid
  C-term NH2
LTFAEYWAQAAAAIA

SEQ ID NO: 1733 - protein, 15 aa, Artificial Sequence
  Description of Artificial Sequence: Synthetic peptide
  N-term Ac
  MOD_RES (3)..(3): 3,4-difluoro-Phe
  MOD_RES (4)..(4): Alpha-Me R-azide 1,4 triazole (6 carbon) alanine olefin amino acid connected by an all-carbon crosslinker comprising one double bond
  misc_feature (4)..(11): Crosslink between residues
  MOD_RES (10)..(10): Cyclobutyl-Ala
  MOD_RES (11)..(11): Alpha-Me alkyne 1,4 triazole (5 carbon) alanine olefin amino acid connected by an all-carbon crosslinker comprising one double bond
  MOD_RES (15)..(15): D-amino acid
  C-term NH2
LTFAEYWAQAAAAIA

SEQ ID NO: 1734 - protein, 15 aa, Artificial Sequence
  Description of Artificial Sequence: Synthetic peptide
  N-term Ac
  MOD_RES (4)..(4): Alpha-Me R-azide 1,4 triazole (6 carbon) alanine olefin amino acid connected by an all-carbon crosslinker comprising one double bond
  misc_feature (4)..(11): Crosslink between residues
  MOD_RES (6)..(6): 4-carboxy-Phe
  MOD_RES (10)..(10): Cyclobutyl-Ala
  MOD_RES (11)..(11): Alpha-Me alkyne 1,4 triazole (5 carbon) alanine olefin amino acid connected by an all-carbon crosslinker comprising one double bond
  MOD_RES (15)..(15): D-amino acid
  C-term NH2
LTFAEFWAQAAAAIA

SEQ ID NO: 1735 - protein, 14 aa, Artificial Sequence
  Description of Artificial Sequence: Synthetic peptide
  N-term Pam
  MOD_RES (4)..(4): Alpha-Me R-azide 1,4 triazole (6 carbon) alanine olefin amino acid connected by an all-carbon crosslinker comprising one double bond
  misc_feature (4)..(11): Crosslink between residues
  MOD_RES (10)..(10): Cyclobutyl-Ala
  MOD_RES (11)..(11): Alpha-Me alkyne 1,4 triazole (5 carbon) alanine olefin amino acid connected by an all-carbon crosslinker comprising one double bond
  C-term NH2
ETFAEYWAQAASAA

SEQ ID NO: 1736 - protein, 14 aa, Artificial Sequence
  Description of Artificial Sequence: Synthetic peptide
  N-term Ac
  MOD_RES (3)..(3): homo-Phe
  MOD_RES (4)..(4): Alpha-Me R-azide 1,4 triazole (6 carbon) alanine olefin amino acid connected by an all-carbon crosslinker comprising one double bond
  misc_feature (4)..(11): Crosslink between residues
  MOD_RES (10)..(10): Cyclobutyl-Ala
  MOD_RES (11)..(11): Alpha-Me alkyne 1,4 triazole (5 carbon) alanine olefin amino acid connected by an all-carbon crosslinker comprising one double bond
  C-term NH2
LTFAEFWAQAASAA

SEQ ID NO: 1737 - protein, 14 aa, Artificial Sequence
  Description of Artificial Sequence: Synthetic peptide
  N-term Ac
  MOD_RES (4)..(4): Alpha-Me R-azide 1,4 triazole (6 carbon) alanine olefin amino acid connected by an all-carbon crosslinker comprising one double bond
  misc_feature (4)..(11): Crosslink between residues
  MOD_RES (10)..(10): Cyclobutyl-Ala
  MOD_RES (11)..(11): Alpha-Me alkyne 1,4 triazole (5 carbon) alanine olefin amino acid connected by an all-carbon crosslinker comprising one double bond
  C-term NH2
LTFAEYAAQAASAA

SEQ ID NO: 1738 - protein, 14 aa, Artificial Sequence
  Description of Artificial Sequence: Synthetic peptide
  N-term Ac
  MOD_RES (4)..(4): Alpha-Me R-azide 1,4 triazole (6 carbon) alanine olefin amino acid connected by an all-carbon crosslinker comprising one double bond
  misc_feature (4)..(11): Crosslink between residues
  MOD_RES (7)..(7): 2Nal
  MOD_RES (10)..(10): Cyclobutyl-Ala
  MOD_RES (11)..(11): Alpha-Me alkyne 1,4 triazole (5 carbon) alanine olefin amino acid connected by an all-carbon crosslinker comprising one double bond
  C-term NH2
LTFAEYAAQAASAA

SEQ ID NO: 1739 - protein, 14 aa, Artificial Sequence
  Description of Artificial Sequence: Synthetic peptide
  N-term Ac
  MOD_RES (4)..(4): Alpha-Me R-azide 1,4 triazole (6 carbon) alanine olefin amino acid connected by an all-carbon crosslinker comprising one double bond
  misc_feature (4)..(11): Crosslink between residues
  MOD_RES (10)..(10): Cyclobutyl-Ala
  MOD_RES (11)..(11): Alpha-Me alkyne 1,4 triazole (5 carbon) alanine olefin amino acid connected by an all-carbon crosslinker comprising one double bond
  C-term NH2
LTFAAYWAQAASAA

SEQ ID NO: 1740 - protein, 14 aa, Artificial Sequence
  Description of Artificial Sequence: Synthetic peptide
  N-term Ac
  MOD_RES (4)..(4): Alpha-Me R-azide 1,4 triazole (6 carbon) alanine olefin amino acid connected by an all-carbon crosslinker comprising one double bond
  misc_feature (4)..(11): Crosslink between residues
  MOD_RES (10)..(10): Cyclobutyl-Ala
  MOD_RES (11)..(11): Alpha-Me alkyne 1,4 triazole (5 carbon) alanine olefin amino acid connected by an all-carbon crosslinker comprising one double bond
  C-term NH2
LTFAEYWAQAASAF

SEQ ID NO: 1741 - protein, 15 aa, Artificial Sequence
  Description of Artificial Sequence: Synthetic peptide
  N-term Ac
  MOD_RES (4)..(4): Alpha-Me R-azide 1,4 triazole (6 carbon) alanine olefin amino acid connected by an all-carbon crosslinker comprising one double bond
  misc_feature (4)..(11): Crosslink between residues
  MOD_RES (10)..(10): Cyclobutyl-Ala
  MOD_RES (11)..(11): Alpha-Me alkyne 1,4 triazole (5 carbon) alanine olefin amino acid connected by an all-carbon crosslinker comprising one double bond
  MOD_RES (15)..(15): D-amino acid
  C-term NH2
LTFAEYWAQAASAFA

SEQ ID NO: 1742 - protein, 14 aa, Artificial Sequence
  Description of Artificial Sequence: Synthetic peptide
  N-term Ac
  MOD_RES (4)..(4): Alpha-Me R-azide 1,4 triazole (6 carbon) alanine olefin amino acid connected by an all-carbon crosslinker comprising one double bond
  misc_feature (4)..(11): Crosslink between residues
  MOD_RES (10)..(10): Cyclobutyl-Ala
  MOD_RES (11)..(11): Alpha-Me alkyne 1,4 triazole (5 carbon) alanine olefin amino acid connected by an all-carbon crosslinker comprising one double bond
  C-term NH2
LTFAAYWAQAASAF

SEQ ID NO: 1743 - protein, 14 aa, Artificial Sequence
  Description of Artificial Sequence: Synthetic peptide
  N-term Ac
  MOD_RES (3)..(3): 3,4-difluoro-Phe
  MOD_RES (4)..(4): Alpha-Me R-azide 1,4 triazole (6 carbon) alanine olefin amino acid connected by an all-carbon crosslinker comprising one double bond
  misc_feature (4)..(11): Crosslink between residues
  MOD_RES (10)..(10): Cyclobutyl-Ala
  MOD_RES (11)..(11): Alpha-Me alkyne 1,4 triazole (5 carbon) alanine olefin amino acid connected by an all-carbon crosslinker comprising one double bond
  C-term NH2
LTFAAYWAQAASAF

SEQ ID NO: 1744 - protein, 14 aa, Artificial Sequence
  Description of Artificial Sequence: Synthetic peptide
  N-term Ac
  MOD_RES (4)..(4): Alpha-Me R-azide 1,4 triazole (6 carbon) alanine olefin amino acid connected by an all-carbon crosslinker comprising one double bond
  misc_feature (4)..(11): Crosslink between residues
  MOD_RES (6)..(6): 4-carboxy-Phe
  MOD_RES (10)..(10): Cyclobutyl-Ala
  MOD_RES (11)..(11): Alpha-Me alkyne 1,4 triazole (5 carbon) alanine olefin amino acid connected by an all-carbon crosslinker comprising one double bond
  C-term NH2
LTFAAFWAQAASAF

SEQ ID NO: 1745 - protein, 14 aa, Artificial Sequence
  Description of Artificial Sequence: Synthetic peptide
  N-term Ac
  MOD_RES (4)..(4): Alpha-Me R-azide 1,4 triazole (6 carbon) alanine olefin amino acid connected by an all-carbon crosslinker comprising one double bond
  misc_feature (4)..(11): Crosslink between residues
  MOD_RES (7)..(7): 6cl-Trp
  MOD_RES (10)..(10): Cyclobutyl-Ala
  MOD_RES (11)..(11): Alpha-Me alkyne 1,4 triazole (5 carbon) alanine olefin amino acid connected by an all-carbon crosslinker comprising one double bond
  C-term NH2
LTFAEYWAQAASAF

SEQ ID NO: 1746 - protein, 14 aa, Artificial Sequence
  Description of Artificial Sequence: Synthetic peptide
  N-term Ac
  MOD_RES (4)..(4): Alpha-Me R-azide 1,4 triazole (6 carbon) alanine olefin amino acid connected by an all-carbon crosslinker comprising one double bond
  misc_feature (4)..(11): Crosslink between residues
  MOD_RES (10)..(10): Cyclobutyl-Ala
  MOD_RES (11)..(11): Alpha-Me alkyne 1,4 triazole (5 carbon) alanine olefin amino acid connected by an all-carbon crosslinker comprising one double bond
  C-term NH2
LTFAAYWSQAASAF

SEQ ID NO: 1747 - protein, 14 aa, Artificial Sequence
  Description of Artificial Sequence: Synthetic peptide
  N-term Ac
  MOD_RES (4)..(4): Alpha-Me R-azide 1,4 triazole (6 carbon) alanine olefin amino acid connected by an all-carbon crosslinker comprising one double bond
  misc_feature (4)..(11): Crosslink between residues
  MOD_RES (10)..(10): Cyclobutyl-Ala
  MOD_RES (11)..(11): Alpha-Me alkyne 1,4 triazole (5 carbon) alanine olefin amino acid connected by an all-carbon crosslinker comprising one double bond
  C-term NH2
LTFAAYWWQAASAF

SEQ ID NO: 1748 - protein, 15 aa, Artificial Sequence
  Description of Artificial Sequence: Synthetic peptide
  N-term Ac
  MOD_RES (4)..(4): Alpha-Me R-azide 1,4 triazole (6 carbon) alanine olefin amino acid connected by an all-carbon crosslinker comprising one double bond
  misc_feature (4)..(11): Crosslink between residues
  MOD_RES (10)..(10): Cyclobutyl-Ala
  MOD_RES (11)..(11): Alpha-Me alkyne 1,4 triazole (5 carbon) alanine olefin amino acid connected by an all-carbon crosslinker comprising one double bond
  MOD_RES (15)..(15): D-amino acid
  C-term NH2
LTFAAYWAQAAAAIA

SEQ ID NO: 1749 - protein, 15 aa, Artificial Sequence
  Description of Artificial Sequence: Synthetic peptide
  N-term Ac
  MOD_RES (3)..(3): 3,4-difluoro-Phe
  MOD_RES (4)..(4): Alpha-Me R-azide 1,4 triazole (6 carbon) alanine olefin amino acid connected by an all-carbon crosslinker comprising one double bond
  misc_feature (4)..(11): Crosslink between residues
  MOD_RES (10)..(10): Cyclobutyl-Ala
  MOD_RES (11)..(11): Alpha-Me alkyne 1,4 triazole (5 carbon) alanine olefin amino acid connected by an all-carbon crosslinker comprising one double bond
  MOD_RES (15)..(15): D-amino acid
  C-term NH2
LTFAAYWAQAAAAIA

SEQ ID NO: 1750 - protein, 15 aa, Artificial Sequence
  Description of Artificial Sequence: Synthetic peptide
  N-term Ac
  MOD_RES (4)..(4): Alpha-Me R-azide 1,4 triazole (6 carbon) alanine olefin amino acid connected by an all-carbon crosslinker comprising one double bond
  misc_feature (4)..(11): Crosslink between residues
  MOD_RES (7)..(7): 6cl-Trp
  MOD_RES (10)..(10): Cyclobutyl-Ala
  MOD_RES (11)..(11): Alpha-Me alkyne 1,4 triazole (5 carbon) alanine olefin amino acid connected by an all-carbon crosslinker comprising one double bond
  MOD_RES (15)..(15): D-amino acid
  C-term NH2
LTFAAYWAQAAAAIA

SEQ ID NO: 1751 - protein, 15 aa, Artificial Sequence
  Description of Artificial Sequence: Synthetic peptide
  N-term Ac
  MOD_RES (4)..(4): Alpha-Me R-azide 1,4 triazole (6 carbon) alanine olefin amino acid connected by an all-carbon crosslinker comprising one double bond
  misc_feature (4)..(11): Crosslink between residues
  MOD_RES (6)..(6): 4-carboxy-Phe
  MOD_RES (10)..(10): Cyclobutyl-Ala
  MOD_RES (11)..(11): Alpha-Me alkyne 1,4 triazole (5 carbon) alanine olefin amino acid connected by an all-carbon crosslinker comprising one double bond
  MOD_RES (15)..(15): D-amino acid
  C-term NH2
LTFAAFWAQAAAAIA

SEQ ID NO: 1752 - protein, 15 aa, Artificial Sequence
  Description of Artificial Sequence: Synthetic peptide
  N-term Ac
  MOD_RES (4)..(4): Alpha-Me R-azide 1,4 triazole (6 carbon) alanine olefin amino acid connected by an all-carbon crosslinker comprising one double bond
  misc_feature (4)..(11): Crosslink between residues
  MOD_RES (10)..(10): Cyclobutyl-Ala
  MOD_RES (11)..(11): Alpha-Me alkyne 1,4 triazole (5 carbon) alanine olefin amino acid connected by an all-carbon crosslinker comprising one double bond
  MOD_RES (15)..(15): D-amino acid
  C-term NH2
LTFAEYWAQAAAAFA

SEQ ID NO: 1753 - protein, 15 aa, Artificial Sequence
  Description of Artificial Sequence: Synthetic peptide
  N-term Ac
  MOD_RES (4)..(4): Alpha-Me R-azide 1,4 triazole (6 carbon) alanine olefin amino acid connected by an all-carbon crosslinker comprising one double bond
  misc_feature (4)..(11): Crosslink between residues
  MOD_RES (10)..(10): Cyclobutyl-Ala
  MOD_RES (11)..(11): Alpha-Me alkyne 1,4 triazole (5 carbon) alanine olefin amino acid connected by an all-carbon crosslinker comprising one double bond
  MOD_RES (15)..(15): D-amino acid
  C-term NH2
LTFAEYWAQAAAAFA

SEQ ID NO: 1754 - protein, 15 aa, Artificial Sequence
  Description of Artificial Sequence: Synthetic peptide
  N-term Ac
  MOD_RES (4)..(4): Alpha-Me R-azide 1,4 triazole (6 carbon) alanine olefin amino acid connected by an all-carbon crosslinker comprising one double bond
  misc_feature (4)..(11): Crosslink between residues
  MOD_RES (10)..(10): Cyclobutyl-Ala
  MOD_RES (11)..(11): Alpha-Me alkyne 1,4 triazole (5 carbon) alanine olefin amino acid connected by an all-carbon crosslinker comprising one double bond
  MOD_RES (14)..(14): Norleucine
  MOD_RES (15)..(15): D-amino acid
  C-term NH2
ETFAAYWAQAAAWLA

SEQ ID NO: 1755 - protein, 15 aa, Artificial Sequence
  Description of Artificial Sequence: Synthetic peptide
  N-term Ac
  MOD_RES (4)..(4): Alpha-Me R-azide 1,4 triazole (6 carbon) alanine olefin amino acid connected by an all-carbon crosslinker comprising one double bond
  misc_feature (4)..(11): Crosslink between residues
  MOD_RES (10)..(10): Cyclobutyl-Ala
  MOD_RES (11)..(11): Alpha-Me alkyne 1,4 triazole (5 carbon) alanine olefin amino acid connected by an all-carbon crosslinker comprising one double bond
  MOD_RES (14)..(14): Norleucine
  MOD_RES (15)..(15): D-amino acid
  C-term NH2
LTFAEYWAQAAAWLA

SEQ ID NO: 1756 - protein, 15 aa, Artificial Sequence
  Description of Artificial Sequence: Synthetic peptide
  N-term Ac
  MOD_RES (4)..(4): Alpha-Me R-azide 1,4 triazole (6 carbon) alanine olefin amino acid connected by an all-carbon crosslinker comprising one double bond
  misc_feature (4)..(11): Crosslink between residues
  MOD_RES (10)..(10): Cyclobutyl-Ala
  MOD_RES (11)..(11): Alpha-Me alkyne 1,4 triazole (5 carbon) alanine olefin amino acid connected by an all-carbon crosslinker comprising one double bond
  MOD_RES (14)..(14): Norleucine
  MOD_RES (15)..(15): D-amino acid
  C-term NH2
ETFAEYWAQAAAWLA

SEQ ID NO: 1757 - protein, 15 aa, Artificial Sequence
  Description of Artificial Sequence: Synthetic peptide
  N-term Ac
  MOD_RES (4)..(4): Alpha-Me R-azide 1,4 triazole (6 carbon) alanine olefin amino acid connected by an all-carbon crosslinker comprising one double bond
  misc_feature (4)..(11): Crosslink between residues
  MOD_RES (10)..(10): Cyclobutyl-Ala
  MOD_RES (11)..(11): Alpha-Me alkyne 1,4 triazole (5 carbon) alanine olefin amino acid connected by an all-carbon crosslinker comprising one double bond
  MOD_RES (14)..(14): Norleucine
  MOD_RES (15)..(15): D-amino acid
  C-term NH2
ETFAEYWAQAAAWLA

SEQ ID NO: 1758 - protein, 15 aa, Artificial Sequence
  Description of Artificial Sequence: Synthetic peptide
  N-term Ac
  MOD_RES (4)..(4): Alpha-Me R-azide 1,4 triazole (6 carbon) alanine olefin amino acid connected by an all-carbon crosslinker comprising one double bond
  misc_feature (4)..(11): Crosslink between residues
  MOD_RES (10)..(10): Cyclobutyl-Ala
  MOD_RES (11)..(11): Alpha-Me alkyne 1,4 triazole (5 carbon) alanine olefin amino acid connected by an all-carbon crosslinker comprising one double bond
  MOD_RES (15)..(15): D-amino acid
  C-term NH2
LTFAAYWAQAASAFA

SEQ ID NO: 1759 - protein, 15 aa, Artificial Sequence
  Description of Artificial Sequence: Synthetic peptide
  N-term Ac
  MOD_RES (4)..(4): Alpha-Me R-azide 1,4 triazole (6 carbon) alanine olefin amino acid connected by an all-carbon crosslinker comprising one double bond
  misc_feature (4)..(11): Crosslink between residues
  MOD_RES (10)..(10): Cyclobutyl-Ala
  MOD_RES (11)..(11): Alpha-Me alkyne 1,4 triazole (5 carbon) alanine olefin amino acid connected by an all-carbon crosslinker comprising one double bond
  MOD_RES (15)..(15): D-amino acid
  C-term NH2
LTFAAYWAQAASAFA

SEQ ID NO: 1760 - protein, 15 aa, Artificial Sequence
  Description of Artificial Sequence: Synthetic peptide
  N-term Ac
  MOD_RES (4)..(4): Alpha-Me R-azide 1,4 triazole (6 carbon) alanine olefin amino acid connected by an all-carbon crosslinker comprising one double bond
  misc_feature (4)..(11): Crosslink between residues
  MOD_RES (11)..(11): Alpha-Me alkyne 1,4 triazole (5 carbon) alanine olefin amino acid connected by an all-carbon crosslinker comprising one double bond
  MOD_RES (14)..(14): Norleucine
  MOD_RES (15)..(15): D-amino acid
  C-term NH2
ETFAAYWAQLAAWLA

SEQ ID NO: 1761 - protein, 15 aa, Artificial Sequence
  Description of Artificial Sequence: Synthetic peptide
  N-term Ac
  MOD_RES (4)..(4): Alpha-Me R-azide 1,4 triazole (6 carbon) alanine olefin amino acid connected by an all-carbon crosslinker comprising one double bond
  misc_feature (4)..(11): Crosslink between residues
  MOD_RES (11)..(11): Alpha-Me alkyne 1,4 triazole (5 carbon) alanine olefin amino acid connected by an all-carbon crosslinker comprising one double bond
  MOD_RES (14)..(14): Norleucine
  MOD_RES (15)..(15): D-amino acid
  C-term NH2
LTFAEYWAQLAAWLA

SEQ ID NO: 1762 - protein, 15 aa, Artificial Sequence
  Description of Artificial Sequence: Synthetic peptide
  N-term Ac
  MOD_RES (4)..(4): Alpha-Me R-azide 1,4 triazole (6 carbon) alanine olefin amino acid connected by an all-carbon crosslinker comprising one double bond
  misc_feature (4)..(11): Crosslink between residues
  MOD_RES (11)..(11): Alpha-Me alkyne 1,4 triazole (5 carbon) alanine olefin amino acid connected by an all-carbon crosslinker comprising one double bond
  MOD_RES (14)..(14): Norleucine
  MOD_RES (15)..(15): D-amino acid
  C-term NH2
ETFAEYWAQLAAWLA

SEQ ID NO: 1763 - protein, 14 aa, Artificial Sequence
  Description of Artificial Sequence: Synthetic peptide
  N-term Dmaac
  MOD_RES (4)..(4): Alpha-Me R-azide 1,4 triazole (6 carbon) alanine olefin amino acid connected by an all-carbon crosslinker comprising one double bond
  misc_feature (4)..(11): Crosslink between residues
  MOD_RES (10)..(10): homo-Leu
  MOD_RES (11)..(11): Alpha-Me alkyne 1,4 triazole (5 carbon) alanine olefin amino acid connected by an all-carbon crosslinker comprising one double bond
  C-term NH2
LTFAEYWAQLASAA

SEQ ID NO: 1764 - protein, 14 aa, Artificial Sequence
  Description of Artificial Sequence: Synthetic peptide
  N-term Hexac
  MOD_RES (4)..(4): Alpha-Me R-azide 1,4 triazole (6 carbon) alanine olefin amino acid connected by an all-carbon crosslinker comprising one double bond
  misc_feature (4)..(11): Crosslink between residues
  MOD_RES (10)..(10): homo-Leu
  MOD_RES (11)..(11): Alpha-Me alkyne 1,4 triazole (5 carbon) alanine olefin amino acid connected by an all-carbon crosslinker comprising one double bond
  C-term NH2
LTFAEYWAQLASAA

SEQ ID NO: 1765 - protein, 14 aa, Artificial Sequence
  Description of Artificial Sequence: Synthetic peptide
  N-term Napac
  MOD_RES (4)..(4): Alpha-Me R-azide 1,4 triazole (6 carbon) alanine olefin amino acid connected by an all-carbon crosslinker comprising one double bond
  misc_feature (4)..(11): Crosslink between residues
  MOD_RES (10)..(10): homo-Leu
  MOD_RES (11)..(11): Alpha-Me alkyne 1,4 triazole (5 carbon) alanine olefin amino acid connected by an all-carbon crosslinker comprising one double bond
  C-term NH2
LTFAEYWAQLASAA

SEQ ID NO: 1766 - protein, 14 aa, Artificial Sequence
  Description of Artificial Sequence: Synthetic peptide
  N-term Decac
  MOD_RES (4)..(4): Alpha-Me R-azide 1,4 triazole (6 carbon) alanine olefin amino acid connected by an all-carbon crosslinker comprising one double bond
  misc_feature (4)..(11): Crosslink between residues
  MOD_RES (10)..(10): homo-Leu
  MOD_RES (11)..(11): Alpha-Me alkyne 1,4 triazole (5 carbon) alanine olefin amino acid connected by an all-carbon crosslinker comprising one double bond
  C-term NH2
LTFAEYWAQLASAA

SEQ ID NO: 1767 - protein, 14 aa, Artificial Sequence
  Description of Artificial Sequence: Synthetic peptide
  N-term Admac
  MOD_RES (4)..(4): Alpha-Me R-azide 1,4 triazole (6 carbon) alanine olefin amino acid connected by an all-carbon crosslinker comprising one double bond
  misc_feature (4)..(11): Crosslink between residues
  MOD_RES (10)..(10): homo-Leu
  MOD_RES (11)..(11): Alpha-Me alkyne 1,4 triazole (5 carbon) alanine olefin amino acid connected by an all-carbon crosslinker comprising one double bond
  C-term NH2
LTFAEYWAQLASAA

SEQ ID NO: 1768 - protein, 14 aa, Artificial Sequence
  Description of Artificial Sequence: Synthetic peptide
  N-term Tmac
  MOD_RES (4)..(4): Alpha-Me R-azide 1,4 triazole (6 carbon) alanine olefin amino acid connected by an all-carbon crosslinker comprising one double bond
  misc_feature (4)..(11): Crosslink between residues
  MOD_RES (10)..(10): homo-Leu
  MOD_RES (11)..(11): Alpha-Me alkyne 1,4 triazole (5 carbon) alanine olefin amino acid connected by an all-carbon crosslinker comprising one double bond
  C-term NH2
LTFAEYWAQLASAA

SEQ ID NO: 1769 - protein, 14 aa, Artificial Sequence
  Description of Artificial Sequence: Synthetic peptide
  N-term Pam
  MOD_RES (4)..(4): Alpha-Me R-azide 1,4 triazole (6 carbon) alanine olefin amino acid connected by an all-carbon crosslinker comprising one double bond
  misc_feature (4)..(11): Crosslink between residues
  MOD_RES (10)..(10): homo-Leu
  MOD_RES (11)..(11): Alpha-Me alkyne 1,4 triazole (5 carbon) alanine olefin amino acid connected by an all-carbon crosslinker comprising one double bond
  C-term NH2
LTFAEYWAQLASAA

SEQ ID NO: 1770 - protein, 15 aa, Artificial Sequence
  Description of Artificial Sequence: Synthetic peptide
  N-term Ac
  MOD_RES (4)..(4): Alpha-Me R-azide 1,4 triazole (6 carbon) alanine olefin amino acid connected by an all-carbon crosslinker comprising one double bond
  misc_feature (4)..(11): Crosslink between residues
  MOD_RES (10)..(10): Cyclobutyl-Ala
  MOD_RES (11)..(11): Alpha-Me alkyne 1,4 triazole (5 carbon) alanine olefin amino acid connected by an all-carbon crosslinker comprising one double bond
  MOD_RES (14)..(14): Norleucine
  C-term NH2
LTFAAYWAQAAAALA

SEQ ID NO: 1771 - protein, 15 aa, Artificial Sequence
  Description of Artificial Sequence: Synthetic peptide
  N-term Ac
  MOD_RES (3)..(3): 3,4-difluoro-Phe
  MOD_RES (4)..(4): Alpha-Me R-azide 1,4 triazole (6 carbon) alanine olefin amino acid connected by an all-carbon crosslinker comprising one double bond
  misc_feature (4)..(11): Crosslink between residues
  MOD_RES (10)..(10): Cyclobutyl-Ala
  MOD_RES (11)..(11): Alpha-Me alkyne 1,4 triazole (5 carbon) alanine olefin amino acid connected by an all-carbon crosslinker comprising one double bond
  MOD_RES (15)..(15): D-amino acid
  C-term NH2
LTFAEYWAQAAAAIA

SEQ ID NO: 1772 - protein, 14 aa, Artificial Sequence
  Description of Artificial Sequence: Synthetic peptide
  N-term Ac
  MOD_RES (3)..(3): 3,4-difluoro-Phe
  MOD_RES (4)..(4): Alpha-Me R-azide 1,4 triazole (6 carbon) alanine olefin amino acid connected by an all-carbon crosslinker comprising one double bond
  misc_feature (4)..(11): Crosslink between residues
  MOD_RES (10)..(10): Cyclobutyl-Ala
  MOD_RES (11)..(11): Alpha-Me alkyne 1,4 triazole (5 carbon) alanine olefin amino acid connected by an all-carbon crosslinker comprising one double bond
  C-term NH2
LTFAEYWAQAASAA

SEQ ID NO: 1773 - protein, 14 aa, Artificial Sequence
  Description of Artificial Sequence: Synthetic peptide
  N-term Ac
  MOD_RES (3)..(3): 3,4-difluoro-Phe
  MOD_RES (4)..(4): Alpha-Me R-azide 1,4 triazole (6 carbon) alanine olefin amino acid connected by an all-carbon crosslinker comprising one double bond
  misc_feature (4)..(11): Crosslink between residues
  MOD_RES (10)..(10): Cyclobutyl-Ala
  MOD_RES (11)..(11): Alpha-Me alkyne 1,4 triazole (5 carbon) alanine olefin amino acid connected by an all-carbon crosslinker comprising one double bond
  C-term NH2
LTFAEYWAQAASAA

SEQ ID NO: 1774 - protein, 14 aa, Artificial Sequence
  Description of Artificial Sequence: Synthetic peptide
  N-term Ac
  MOD_RES (4)..(4): Alpha-Me R-azide 1,4 triazole (6 carbon) alanine olefin amino acid connected by an all-carbon crosslinker comprising one double bond
  misc_feature (4)..(11): Crosslink between residues
  MOD_RES (6)..(6): 4-carboxy-Phe
  MOD_RES (10)..(10): Cyclobutyl-Ala
  MOD_RES (11)..(11): Alpha-Me alkyne 1,4 triazole (5 carbon) alanine olefin amino acid connected by an all-carbon crosslinker comprising one double bond
  C-term NH2
LTFAEFWAQAASAA

SEQ ID NO: 1775 - protein, 14 aa, Artificial Sequence
  Description of Artificial Sequence: Synthetic peptide
  N-term Ac
  MOD_RES (4)..(4): Alpha-Me R-azide 1,4 triazole (6 carbon) alanine olefin amino acid connected by an all-carbon crosslinker comprising one double bond
  misc_feature (4)..(11): Crosslink between residues
  MOD_RES (6)..(6): 4-carboxy-Phe
  MOD_RES (10)..(10): Cyclobutyl-Ala
  MOD_RES (11)..(11): Alpha-Me alkyne 1,4 triazole (5 carbon) alanine olefin amino acid connected by an all-carbon crosslinker comprising one double bond
  C-term NH2
LTFAEFWAQAASAA

SEQ ID NO: 1776 - protein, 14 aa, Artificial Sequence
  Description of Artificial Sequence: Synthetic peptide
  N-term Ac
  MOD_RES (4)..(4): Alpha-Me R-azide 1,4 triazole (6 carbon) alanine olefin amino acid connected by an all-carbon crosslinker comprising one double bond
  misc_feature (4)..(11): Crosslink between residues
  MOD_RES (10)..(10): Cyclobutyl-Ala
  MOD_RES (11)..(11): Alpha-Me alkyne 1,4 triazole (5 carbon) alanine olefin amino acid connected by an all-carbon crosslinker comprising one double bond
  C-term NH2
LTFAEYWSQAASAA

SEQ ID NO: 1777 - protein, 14 aa, Artificial Sequence
  Description of Artificial Sequence: Synthetic peptide
  N-term Ac
  MOD_RES (4)..(4): Alpha-Me R-azide 1,4 triazole (6 carbon) alanine olefin amino acid connected by an all-carbon crosslinker comprising one double bond
  misc_feature (4)..(11): Crosslink between residues
  MOD_RES (10)..(10): Cyclobutyl-Ala
  MOD_RES (11)..(11): Alpha-Me alkyne 1,4 triazole (5 carbon) alanine olefin amino acid connected by an all-carbon crosslinker comprising one double bond
  C-term NH2
LTFAEYWSQAASAA

SEQ ID NO: 1778 - protein, 14 aa, Artificial Sequence
  Description of Artificial Sequence: Synthetic peptide
  N-term Ac
  MOD_RES (4)..(4): Alpha-Me R-azide 1,4 triazole (6 carbon) alanine olefin amino acid connected by an all-carbon crosslinker comprising one double bond
  misc_feature (4)..(11): Crosslink between residues
  MOD_RES (10)..(10): homo-Leu
  MOD_RES (11)..(11): Alpha-Me alkyne 1,4 triazole (5 carbon) alanine olefin amino acid connected by an all-carbon crosslinker comprising one double bond
  C-term NH2
LTFAEYWAQLASAA

SEQ ID NO: 1779 - protein, 14 aa, Artificial Sequence
  Description of Artificial Sequence: Synthetic peptide
  N-term Ac
  MOD_RES (4)..(4): Alpha-Me R-azide 1,4 triazole (6 carbon) alanine olefin amino acid connected by an all-carbon crosslinker comprising one double bond
  misc_feature (4)..(11): Crosslink between residues
  MOD_RES (10)..(10): homo-Leu
  MOD_RES (11)..(11): Alpha-Me alkyne 1,4 triazole (5 carbon) alanine olefin amino acid connected by an all-carbon crosslinker comprising one double bond
  C-term NH2
LTFAAYWAQLASAF

SEQ ID NO: 1780 - protein, 14 aa, Artificial Sequence
  Description of Artificial Sequence: Synthetic peptide
  N-term Ac
  MOD_RES (4)..(4): Alpha-Me R-azide 1,4 triazole (6 carbon) alanine olefin amino acid connected by an all-carbon crosslinker comprising one double bond
  misc_feature (4)..(11): Crosslink between residues
  MOD_RES (10)..(10): homo-Leu
  MOD_RES (11)..(11): Alpha-Me alkyne 1,4 triazole (5 carbon) alanine olefin amino acid connected by an all-carbon crosslinker comprising one double bond
  C-term NH2
LTFAAYWAQLASAF

SEQ ID NO: 1781 - protein, 14 aa, Artificial Sequence
  Description of Artificial Sequence: Synthetic peptide
  N-term Ac
  MOD_RES (3)..(3): 3,4-difluoro-Phe
  MOD_RES (4)..(4): Alpha-Me R-azide 1,4 triazole (6 carbon) alanine olefin amino acid connected by an all-carbon crosslinker comprising one double bond
  misc_feature (4)..(11): Crosslink between residues
  MOD_RES (10)..(10): homo-Leu
  MOD_RES (11)..(11): Alpha-Me alkyne 1,4 triazole (5 carbon) alanine olefin amino acid connected by an all-carbon crosslinker comprising one double bond
  C-term NH2
LTFAAYWAQLASAA

SEQ ID NO: 1782 - protein, 14 aa, Artificial Sequence
  Description of Artificial Sequence: Synthetic peptide
  N-term Ac
  MOD_RES (3)..(3): 3,4-difluoro-Phe
  MOD_RES (4)..(4): Alpha-Me R-azide 1,4 triazole (6 carbon) alanine olefin amino acid connected by an all-carbon crosslinker comprising one double bond
  misc_feature (4)..(11): Crosslink between residues
  MOD_RES (10)..(10): homo-Leu
  MOD_RES (11)..(11): Alpha-Me alkyne 1,4 triazole (5 carbon) alanine olefin amino acid connected by an all-carbon crosslinker comprising one double bond
  C-term NH2
LTFAAYWAQLASAA

SEQ ID NO: 1783 - protein, 14 aa, Artificial Sequence
  Description of Artificial Sequence: Synthetic peptide
  N-term Ac
  MOD_RES (4)..(4): Alpha-Me R-azide 1,4 triazole (6 carbon) alanine olefin amino acid connected by an all-carbon crosslinker comprising one double bond
  misc_feature (4)..(11): Crosslink between residues
  MOD_RES (6)..(6): 4-carboxy-Phe
  MOD_RES (10)..(10): homo-Leu
  MOD_RES (11)..(11): Alpha-Me alkyne 1,4 triazole (5 carbon) alanine olefin amino acid connected by an all-carbon crosslinker comprising one double bond
  C-term NH2
LTFAAFWAQLASAA

SEQ ID NO: 1784 - protein, 14 aa, Artificial Sequence
  Description of Artificial Sequence: Synthetic peptide
  N-term Ac
  MOD_RES (4)..(4): Alpha-Me R-azide 1,4 triazole (6 carbon) alanine olefin amino acid connected by an all-carbon crosslinker comprising one double bond
  misc_feature (4)..(11): Crosslink between residues
  MOD_RES (6)..(6): 4-carboxy-Phe
  MOD_RES (10)..(10): homo-Leu
  MOD_RES (11)..(11): Alpha-Me alkyne 1,4 triazole (5 carbon) alanine olefin amino acid connected by an all-carbon crosslinker comprising one double bond
  C-term NH2
LTFAAFWAQLASAA

SEQ ID NO: 1785 - protein, 14 aa, Artificial Sequence
  Description of Artificial Sequence: Synthetic peptide
  N-term Ac
  MOD_RES (4)..(4): Alpha-Me R-azide 1,4 triazole (6 carbon) alanine olefin amino acid connected by an all-carbon crosslinker comprising one double bond
  misc_feature (4)..(11): Crosslink between residues
  MOD_RES (10)..(10): homo-Leu
  MOD_RES (11)..(11): Alpha-Me alkyne 1,4 triazole (5 carbon) alanine olefin amino acid connected by an all-carbon crosslinker comprising one double bond
  C-term NH2
LTFAAYWSQLASAA

SEQ ID NO: 1786 - protein, 14 aa, Artificial Sequence
  Description of Artificial Sequence: Synthetic peptide
  N-term Ac
  MOD_RES (4)..(4): Alpha-Me R-azide 1,4 triazole (6 carbon) alanine olefin amino acid connected by an all-carbon crosslinker comprising one double bond
  misc_feature (4)..(11): Crosslink between residues
  MOD_RES (10)..(10): homo-Leu
  MOD_RES (11)..(11): Alpha-Me alkyne 1,4 triazole (5 carbon) alanine olefin amino acid connected by an all-carbon crosslinker comprising one double bond
  C-term NH2
LTFAAYWSQLASAA

SEQ ID NO: 1787 - protein, 15 aa, Artificial Sequence
  Description of Artificial Sequence: Synthetic peptide
  N-term Ac
  MOD_RES (4)..(4): Alpha-Me R-azide 1,4 triazole (6 carbon) alanine olefin amino acid connected by an all-carbon crosslinker comprising one double bond
  misc_feature (4)..(11): Crosslink between residues
  MOD_RES (11)..(11): Alpha-Me alkyne 1,4 triazole (5 carbon) alanine olefin amino acid connected by an all-carbon crosslinker comprising one double bond
  MOD_RES (14)..(14): Norleucine
  C-term NH2
LTFAEYWAQLAAALA

SEQ ID NO: 1788 - protein, 15 aa, Artificial Sequence
  Description of Artificial Sequence: Synthetic peptide
  N-term Ac
  MOD_RES (3)..(3): 3,4-difluoro-Phe
  MOD_RES (4)..(4): Alpha-Me R-azide 1,4 triazole (6 carbon) alanine olefin amino acid connected by an all-carbon crosslinker comprising one double bond
  misc_feature (4)..(11): Crosslink between residues
  MOD_RES (11)..(11): Alpha-Me alkyne 1,4 triazole (5 carbon) alanine olefin amino acid connected by an all-carbon crosslinker comprising one double bond
  MOD_RES (14)..(14): Norleucine
  C-term NH2
LTFAAYWAQLAAALA

SEQ ID NO: 1789 - protein, 15 aa, Artificial Sequence
  Description of Artificial Sequence: Synthetic peptide
  N-term Ac
  MOD_RES (4)..(4): Alpha-Me R-azide 1,4 triazole (6 carbon) alanine olefin amino acid connected by an all-carbon crosslinker comprising one double bond
  misc_feature (4)..(11): Crosslink between residues
  MOD_RES (6)..(6): 4-carboxy-Phe
  MOD_RES (11)..(11): Alpha-Me alkyne 1,4 triazole (5 carbon) alanine olefin amino acid connected by an all-carbon crosslinker comprising one double bond
  MOD_RES (14)..(14): Norleucine
  C-term NH2
LTFAAFWAQLAAALA

SEQ ID NO: 1790 - protein, 15 aa, Artificial Sequence
  Description of Artificial Sequence: Synthetic peptide
  N-term Ac
  MOD_RES (4)..(4): Alpha-Me R-azide 1,4 triazole (6 carbon) alanine olefin amino acid connected by an all-carbon crosslinker comprising one double bond
  misc_feature (4)..(11): Crosslink between residues
  MOD_RES (11)..(11): Alpha-Me alkyne 1,4 triazole (5 carbon) alanine olefin amino acid connected by an all-carbon crosslinker comprising one double bond
  MOD_RES (14)..(14): Norleucine
  C-term NH2
LTFAAYWSQLAAALA

SEQ ID NO: 1791 - protein, 15 aa, Artificial Sequence
  Description of Artificial Sequence: Synthetic peptide
  N-term Ac
  MOD_RES (3)..(3): 3,4-difluoro-Phe
  MOD_RES (4)..(4): Alpha-Me R-azide 1,4 triazole (6 carbon) alanine olefin amino acid connected by an all-carbon crosslinker comprising one double bond
  misc_feature (4)..(11): Crosslink between residues
  MOD_RES (10)..(10): homo-Leu
  MOD_RES (11)..(11): Alpha-Me alkyne 1,4 triazole (5 carbon) alanine olefin amino acid connected by an all-carbon crosslinker comprising one double bond
  MOD_RES (14)..(14): Norleucine
  C-term NH2
LTFAAYWAQLAAALA

SEQ ID NO: 1792 - protein, 15 aa, Artificial Sequence
  Description of Artificial Sequence: Synthetic peptide
  N-term Ac
  MOD_RES (3)..(3): 3,4-difluoro-Phe
  MOD_RES (4)..(4): Alpha-Me R-azide 1,4 triazole (6 carbon) alanine olefin amino acid connected by an all-carbon crosslinker comprising one double bond
  misc_feature (4)..(11): Crosslink between residues
  MOD_RES (10)..(10): homo-Leu
  MOD_RES (11)..(11): Alpha-Me alkyne 1,4 triazole (5 carbon) alanine olefin amino acid connected by an all-carbon crosslinker comprising one double bond
  MOD_RES (14)..(14): Norleucine
  C-term NH2
LTFAAYWAQLAAALA

SEQ ID NO: 1793 - protein, 15 aa, Artificial Sequence
  Description of Artificial Sequence: Synthetic peptide
  N-term Ac
  MOD_RES (4)..(4): Alpha-Me R-azide 1,4 triazole (6 carbon) alanine olefin amino acid connected by an all-carbon crosslinker comprising one double bond
  misc_feature (4)..(11): Crosslink between residues
  MOD_RES (6)..(6): 4-carboxy-Phe
  MOD_RES (10)..(10): homo-Leu
  MOD_RES (11)..(11): Alpha-Me alkyne 1,4 triazole (5 carbon) alanine olefin amino acid connected by an all-carbon crosslinker comprising one double bond
  MOD_RES (14)..(14): Norleucine
  C-term NH2
LTFAAFWAQLAAALA

SEQ ID NO: 1794 - protein, 15 aa, Artificial Sequence
  Description of Artificial Sequence: Synthetic peptide
  N-term Ac
  MOD_RES (4)..(4): Alpha-Me R-azide 1,4 triazole (6 carbon) alanine olefin amino acid connected by an all-carbon crosslinker comprising one double bond
  misc_feature (4)..(11): Crosslink between residues
  MOD_RES (6)..(6): 4-carboxy-Phe
  MOD_RES (10)..(10): homo-Leu
  MOD_RES (11)..(11): Alpha-Me alkyne 1,4 triazole (5 carbon) alanine olefin amino acid connected by an all-carbon crosslinker comprising one double bond
  MOD_RES (14)..(14): Norleucine
  C-term NH2
LTFAAFWAQLAAALA

SEQ ID NO: 1795 - protein, 15 aa, Artificial Sequence
  Description of Artificial Sequence: Synthetic peptide
  N-term Ac
  MOD_RES (4)..(4): Alpha-Me R-azide 1,4 triazole (6 carbon) alanine olefin amino acid connected by an all-carbon crosslinker comprising one double bond
  misc_feature (4)..(11): Crosslink between residues
  MOD_RES (10)..(10): homo-Leu
  MOD_RES (11)..(11): Alpha-Me alkyne 1,4 triazole (5 carbon) alanine olefin amino acid connected by an all-carbon crosslinker comprising one double bond
  MOD_RES (14)..(14): Norleucine
  C-term NH2
LTFAAYWSQLAAALA

SEQ ID NO: 1796 - protein, 15 aa, Artificial Sequence
  Description of Artificial Sequence: Synthetic peptide
  N-term Ac
  MOD_RES (4)..(4): Alpha-Me R-azide 1,4 triazole (6 carbon) alanine olefin amino acid connected by an all-carbon crosslinker comprising one double bond
  misc_feature (4)..(11): Crosslink between residues
  MOD_RES (10)..(10): homo-Leu
  MOD_RES (11)..(11): Alpha-Me alkyne 1,4 triazole (5 carbon) alanine olefin amino acid connected by an all-carbon crosslinker comprising one double bond
  MOD_RES (14)..(14): Norleucine
  C-term NH2
LTFAAYWSQLAAALA

SEQ ID NO: 1797 - protein, 16 aa, Artificial Sequence
  Description of Artificial Sequence: Synthetic peptide
  N-term Ac
  MOD_RES (4)..(4): Alpha-Me R-azide 1,4 triazole (6 carbon) alanine olefin amino acid connected by an all-carbon crosslinker comprising one double bond
  misc_feature (4)..(11): Crosslink between residues
  MOD_RES (10)..(10): homo-Leu
  MOD_RES (11)..(11): Alpha-Me alkyne 1,4 triazole (5 carbon) alanine olefin amino acid connected by an all-carbon crosslinker comprising one double bond
  MOD_RES (16)..(16): D-amino acid
  C-term NH2
LTFAAYWAQLAAAAAA

SEQ ID NO: 1798 - protein, 16 aa, Artificial Sequence
  Description of Artificial Sequence: Synthetic peptide
  N-term Ac
  MOD_RES (4)..(4): Alpha-Me R-azide 1,4 triazole (6 carbon) alanine olefin amino acid connected by an all-carbon crosslinker comprising one double bond
  misc_feature (4)..(11): Crosslink between residues
  MOD_RES (10)..(10): homo-Leu
  MOD_RES (11)..(11): Alpha-Me alkyne 1,4 triazole (5 carbon) alanine olefin amino acid connected by an all-carbon crosslinker comprising one double bond
  MOD_RES (16)..(16): D-amino acid
  C-term NH2
LTFAAYWAQLAAAAAA

SEQ ID NO: 1799 - protein, 18 aa, Artificial Sequence
  Description of Artificial Sequence: Synthetic peptide
  N-term Ac
  MOD_RES (4)..(4): Alpha-Me R-azide 1,4 triazole (6 carbon) alanine olefin amino acid connected by an all-carbon crosslinker comprising one double bond
  misc_feature (4)..(11): Crosslink between residues
  MOD_RES (11)..(11): Alpha-Me alkyne 1,4 triazole (5 carbon) alanine olefin amino acid connected by an all-carbon crosslinker comprising one double bond
  MOD_RES (18)..(18): D-amino acid
  C-term NH2
LTFAAYWAQLAAAAAAAA

SEQ ID NO: 1800 - protein, 18 aa, Artificial Sequence
  Description of Artificial Sequence: Synthetic peptide
  N-term Ac
  MOD_RES (4)..(4): Alpha-Me R-azide 1,4 triazole (6 carbon) alanine olefin amino acid connected by an all-carbon crosslinker comprising one double bond
  misc_feature (4)..(11): Crosslink between residues
  MOD_RES (11)..(11): Alpha-Me alkyne 1,4 triazole (5 carbon) alanine olefin amino acid connected by an all-carbon crosslinker comprising one double bond
  MOD_RES (18)..(18): D-amino acid
  C-term NH2
LTFAAYWAQLAAAAAAAA

SEQ ID NO: 1801 - protein, 15 aa, Artificial Sequence
  Description of Artificial Sequence: Synthetic peptide
  N-term Ac
  MOD_RES (4)..(4): Alpha-Me R-azide 1,4 triazole (6 carbon) alanine olefin amino acid connected by an all-carbon crosslinker comprising one double bond
  misc_feature (4)..(11): Crosslink between residues
  MOD_RES (10)..(10): homo-Leu
  MOD_RES (11)..(11): Alpha-Me alkyne 1,4 triazole (5 carbon) alanine olefin amino acid connected by an all-carbon crosslinker comprising one double bond
  MOD_RES (14)..(14): Norleucine
  C-term NH2
LTFAEYWAQLAAALA

SEQ ID NO: 1802 - protein, 16 aa, Artificial Sequence
  Description of Artificial Sequence: Synthetic peptide
  N-term Ac
  MOD_RES (5)..(5): Alpha-Me R-azide 1,4 triazole (6 carbon) alanine olefin amino acid connected by an all-carbon crosslinker comprising one double bond
  misc_feature (5)..(12): Crosslink between residues
  MOD_RES (12)..(12): Alpha-Me alkyne 1,4 triazole (5 carbon) alanine olefin amino acid connected by an all-carbon crosslinker comprising one double bond
  MOD_RES (15)..(15): Norleucine
  C-term NH2
AATFAAYWAQLAAALA

SEQ ID NO: 1803 - protein, 16 aa, Artificial Sequence
  Description of Artificial Sequence: Synthetic peptide
  N-term Ac
  MOD_RES (4)..(4): Alpha-Me R-azide 1,4 triazole (6 carbon) alanine olefin amino acid connected by an all-carbon crosslinker comprising one double bond
  misc_feature (4)..(11): Crosslink between residues
  MOD_RES (11)..(11): Alpha-Me alkyne 1,4 triazole (5 carbon) alanine olefin amino acid connected by an all-carbon crosslinker comprising one double bond
  MOD_RES (14)..(14): Norleucine
  C-term NH2
LTFAAYWAQLAAALAA

SEQ ID NO: 1804 - protein, 17 aa, Artificial Sequence
  Description of Artificial Sequence: Synthetic peptide
  N-term Ac
  MOD_RES (5)..(5): Alpha-Me R-azide 1,4 triazole (6 carbon) alanine olefin amino acid connected by an all-carbon crosslinker comprising one double bond
  misc_feature (5)..(12): Crosslink between residues
  MOD_RES (12)..(12): Alpha-Me alkyne 1,4 triazole (5 carbon) alanine olefin amino acid connected by an all-carbon crosslinker comprising one double bond
  MOD_RES (15)..(15): Norleucine
  C-term NH2
ALTFAAYWAQLAAALAA

SEQ ID NO: 1805 - protein, 16 aa, Artificial Sequence
  Description of Artificial Sequence: Synthetic peptide
  N-term Ac
  MOD_RES (4)..(4): Alpha-Me R-azide 1,4 triazole (6 carbon) alanine olefin amino acid connected by an all-carbon crosslinker comprising one double bond
  misc_feature (4)..(11): Crosslink between residues
  MOD_RES (10)..(10): Cyclobutyl-Ala
  MOD_RES (11)..(11): Alpha-Me alkyne 1,4 triazole (5 carbon) alanine olefin amino acid connected by an all-carbon crosslinker comprising one double bond
  MOD_RES (14)..(14): Norleucine
  C-term NH2
LTFAAYWAQAAAALAA

SEQ ID NO: 1806 - protein, 16 aa, Artificial Sequence
  Description of Artificial Sequence: Synthetic peptide
  N-term Ac
  MOD_RES (4)..(4): Alpha-Me R-azide 1,4 triazole (6 carbon) alanine olefin amino acid connected by an all-carbon crosslinker comprising one double bond
  misc_feature (4)..(11): Crosslink between residues
  MOD_RES (10)..(10): homo-Leu
  MOD_RES (11)..(11): Alpha-Me alkyne 1,4 triazole (5 carbon) alanine olefin amino acid connected by an all-carbon crosslinker comprising one double bond
  MOD_RES (14)..(14): Norleucine
  C-term NH2
LTFAAYWAQLAAALAA

SEQ ID NO: 1807 - protein, 15 aa, Artificial Sequence
  Description of Artificial Sequence: Synthetic peptide
  N-term Ac
  MOD_RES (4)..(4): Alpha-Me R-azide 1,4 triazole (6 carbon) alanine olefin amino acid connected by an all-carbon crosslinker comprising one double bond
  misc_feature (4)..(11): Crosslink between residues
  MOD_RES (10)..(10): Cyclobutyl-Ala
  MOD_RES (11)..(11): Alpha-Me alkyne 1,4 triazole (5 carbon) alanine olefin amino acid connected by an all-carbon crosslinker comprising one double bond
  C-term NH2
LTFAEYWAQAASAAA

SEQ ID NO: 1808 - protein, 15 aa, Artificial Sequence
  Description of Artificial Sequence: Synthetic peptide
  N-term Ac
  MOD_RES (4)..(4): Alpha-Me R-azide 1,4 triazole (6 carbon) alanine olefin amino acid connected by an all-carbon crosslinker comprising one double bond
  misc_feature (4)..(11): Crosslink between residues
  MOD_RES (10)..(10): Cyclobutyl-Ala
  MOD_RES (11)..(11): Alpha-Me alkyne 1,4 triazole (5 carbon) alanine olefin amino acid connected by an all-carbon crosslinker comprising one double bond
  C-term NH2
LTFAEYWAQAASAAA

SEQ ID NO: 1809 - protein, 16 aa, Artificial Sequence
  Description of Artificial Sequence: Synthetic peptide
  N-term Ac
  MOD_RES (4)..(4): Alpha-Me R-azide 1,4 triazole (6 carbon) alanine olefin amino acid connected by an all-carbon crosslinker comprising one double bond
  misc_feature (4)..(11): Crosslink between residues
  MOD_RES (10)..(10): Cyclobutyl-Ala
  MOD_RES (11)..(11): Alpha-Me alkyne 1,4 triazole (5 carbon) alanine olefin amino acid connected by an all-carbon crosslinker comprising one double bond
  C-term NH2
LTFAEYWAQAASAAAA

SEQ ID NO: 1810 - protein, 16 aa, Artificial Sequence
  Description of Artificial Sequence: Synthetic peptide
  N-term Ac
  MOD_RES (4)..(4): Alpha-Me R-azide 1,4 triazole (6 carbon) alanine olefin amino acid connected by an all-carbon crosslinker comprising one double bond
  misc_feature (4)..(11): Crosslink between residues
  MOD_RES (10)..(10): Cyclobutyl-Ala
  MOD_RES (11)..(11): Alpha-Me alkyne 1,4 triazole (5 carbon) alanine olefin amino acid connected by an all-carbon crosslinker comprising one double bond
  C-term NH2
LTFAEYWAQAASAAAA

SEQ ID NO: 1811 - protein, 15 aa, Artificial Sequence
  Description of Artificial Sequence: Synthetic peptide
  N-term Ac
  MOD_RES (5)..(5): Alpha-Me R-azide 1,4 triazole (6 carbon) alanine olefin amino acid connected by an all-carbon crosslinker comprising one double bond
  misc_feature (5)..(12): Crosslink between residues
  MOD_RES (11)..(11): Cyclobutyl-Ala
  MOD_RES (12)..(12): Alpha-Me alkyne 1,4 triazole (5 carbon) alanine olefin amino acid connected by an all-carbon crosslinker comprising one double bond
  C-term NH2
ALTFAEYWAQAASAA

SEQ ID NO: 1812 - protein, 16 aa, Artificial Sequence
  Description of Artificial Sequence: Synthetic peptide
  N-term Ac
  MOD_RES (5)..(5): Alpha-Me R-azide 1,4 triazole (6 carbon) alanine olefin amino acid connected by an all-carbon crosslinker comprising one double bond
  misc_feature (5)..(12): Crosslink between residues
  MOD_RES (11)..(11): Cyclobutyl-Ala
  MOD_RES (12)..(12): Alpha-Me alkyne 1,4 triazole (5 carbon) alanine olefin amino acid connected by an all-carbon crosslinker comprising one double bond
  C-term NH2
ALTFAEYWAQAASAAA

SEQ ID NO: 1813 - protein, 15 aa, Artificial Sequence
  Description of Artificial Sequence: Synthetic peptide
  N-term Ac
  MOD_RES (5)..(5): Alpha-Me R-azide 1,4 triazole (6 carbon) alanine olefin amino acid connected by an all-carbon crosslinker comprising one double bond
  misc_feature (5)..(12): Crosslink between residues
  MOD_RES (11)..(11): Cyclobutyl-Ala
  MOD_RES (12)..(12): Alpha-Me alkyne 1,4 triazole (5 carbon) alanine olefin amino acid connected by an all-carbon crosslinker comprising one double bond
  C-term NH2
ALTFAEYWAQAASAA

SEQ ID NO: 1814 - protein, 14 aa, Artificial Sequence
  Description of Artificial Sequence: Synthetic peptide
  N-term Ac
  MOD_RES (4)..(4): Alpha-Me R-azide 1,4 triazole (6 carbon) alanine olefin amino acid connected by an all-carbon crosslinker comprising one double bond
  misc_feature (4)..(11): Crosslink between residues
  MOD_RES (7)..(7): 6cl-Trp
  MOD_RES (10)..(10): Cyclobutyl-Ala
  MOD_RES (11)..(11): Alpha-Me alkyne 1,4 triazole (5 carbon) alanine olefin amino acid connected by an all-carbon crosslinker comprising one double bond
  C-term NH2
LTFAEYWAQAASAA

SEQ ID NO: 1815 - protein, 15 aa, Artificial Sequence
  Description of Artificial Sequence: Synthetic peptide
  N-term Ac
  MOD_RES (4)..(4): Alpha-Me R-azide 1,4 triazole (6 carbon) alanine olefin amino acid connected by an all-carbon crosslinker comprising one double bond
  misc_feature (4)..(11): Crosslink between residues
  MOD_RES (6)..(6): 4-carboxy-Phe
  MOD_RES (7)..(7): 6cl-Trp
  MOD_RES (10)..(10): Cyclobutyl-Ala
  MOD_RES (11)..(11): Alpha-Me alkyne 1,4 triazole (5 carbon) alanine olefin amino acid connected by an all-carbon crosslinker comprising one double bond
  MOD_RES (14)..(14): Norleucine
  C-term NH2
LTFAEFWAQAASALA

SEQ ID NO: 1816 - protein, 15 aa, Artificial Sequence
  Description of Artificial Sequence: Synthetic peptide
  N-term Ac
  MOD_RES (4)..(4): Alpha-Me R-azide 1,4 triazole (6 carbon) alanine olefin amino acid connected by an all-carbon crosslinker comprising one double bond
  misc_feature (4)..(11): Crosslink between residues
  MOD_RES (6)..(6): 4-carboxy-Phe
  MOD_RES (7)..(7): 6cl-Trp
  MOD_RES (10)..(10): Cyclobutyl-Ala
  MOD_RES (11)..(11): Alpha-Me alkyne 1,4 triazole (5 carbon) alanine olefin amino acid connected by an all-carbon crosslinker comprising one double bond
  MOD_RES (14)..(14): Norleucine
  C-term NH2
LTFAEFWAQAASALA

SEQ ID NO: 1817 - protein, 15 aa, Artificial Sequence
  Description of Artificial Sequence: Synthetic peptide
  N-term Ac
  MOD_RES (4)..(4): Alpha-Me R-azide 1,4 triazole (6 carbon) alanine olefin amino acid connected by an all-carbon crosslinker comprising one double bond
  misc_feature (4)..(11): Crosslink between residues
  MOD_RES (6)..(6): 4-carboxy-Phe
  MOD_RES (7)..(7): 6cl-Trp
  MOD_RES (10)..(10): Cyclobutyl-Ala
  MOD_RES (11)..(11): Alpha-Me alkyne 1,4 triazole (5 carbon) alanine olefin amino acid connected by an all-carbon crosslinker comprising one double bond
  MOD_RES (15)..(15): D-amino acid
  C-term NH2
LTFAEFWAQAAAAIA

SEQ ID NO: 1818 - protein, 15 aa, Artificial Sequence
  Description of Artificial Sequence: Synthetic peptide
  N-term Ac
  MOD_RES (4)..(4): Alpha-Me R-azide 1,4 triazole (6 carbon) alanine olefin amino acid connected by an all-carbon crosslinker comprising one double bond
  misc_feature (4)..(11): Crosslink between residues
  MOD_RES (6)..(6): 4-carboxy-Phe
  MOD_RES (7)..(7): 6cl-Trp
  MOD_RES (10)..(10): Cyclobutyl-Ala
  MOD_RES (11)..(11): Alpha-Me alkyne 1,4 triazole (5 carbon) alanine olefin amino acid connected by an all-carbon crosslinker comprising one double bond
  MOD_RES (15)..(15): D-amino acid
  C-term NH2
LTFAEFWAQAAAAIA

SEQ ID NO: 1819 - protein, 17 aa, Artificial Sequence
  Description of Artificial Sequence: Synthetic peptide
  N-term Ac
  MOD_RES (4)..(4): Alpha-Me R-azide 1,4 triazole (6 carbon) alanine olefin amino acid connected by an all-carbon crosslinker comprising one double bond
  misc_feature (4)..(11): Crosslink between residues
  MOD_RES (7)..(7): 6cl-Trp
  MOD_RES (11)..(11): Alpha-Me alkyne 1,4 triazole (5 carbon) alanine olefin amino acid connected by an all-carbon crosslinker comprising one double bond
  MOD_RES (17)..(17): D-amino acid
  C-term NH2
LTFAAYWAQLAAAAAAA

SEQ ID NO: 1820 - protein, 17 aa, Artificial Sequence
  Description of Artificial Sequence: Synthetic peptide
  N-term Ac
  MOD_RES (4)..(4): Alpha-Me R-azide 1,4 triazole (6 carbon) alanine olefin amino acid connected by an all-carbon crosslinker comprising one double bond
  misc_feature (4)..(11): Crosslink between residues
  MOD_RES (7)..(7): 6cl-Trp
  MOD_RES (11)..(11): Alpha-Me alkyne 1,4 triazole (5 carbon) alanine olefin amino acid connected by an all-carbon crosslinker comprising one double bond
  MOD_RES (17)..(17): D-amino acid
  C-term NH2
LTFAAYWAQLAAAAAAA

SEQ ID NO: 1821 - protein, 16 aa, Artificial Sequence
  Description of Artificial Sequence: Synthetic peptide
  N-term Ac
  MOD_RES (2)..(2): Alpha-Me R-azide 1,4 triazole (6 carbon) alanine olefin amino acid connected by an all-carbon crosslinker comprising one double bond
  misc_feature (2)..(9): Crosslink between residues
  MOD_RES (5)..(5): 6cl-Trp
  MOD_RES (9)..(9): Alpha-Me alkyne 1,4 triazole (5 carbon) alanine olefin amino acid connected by an all-carbon crosslinker comprising one double bond
  MOD_RES (16)..(16): D-amino acid
  C-term NH2
FAAYWEALAAAAAAAA

SEQ ID NO: 1822 - protein, 17 aa, Artificial Sequence
  Description of Artificial Sequence: Synthetic peptide
  N-term Ac
  MOD_RES (4)..(4): Alpha-Me R-azide 1,4 triazole (6 carbon) alanine olefin amino acid connected by an all-carbon crosslinker comprising one double bond
  misc_feature (4)..(11): Crosslink between residues
  MOD_RES (11)..(11): Alpha-Me alkyne 1,4 triazole (5 carbon) alanine olefin amino acid connected by an all-carbon crosslinker comprising one double bond
  MOD_RES (17)..(17): D-amino acid
  C-term NH2
ETFAEYWAQLAAAAAAA

SEQ ID NO: 1823 - protein, 17 aa, Artificial Sequence
  Description of Artificial Sequence: Synthetic peptide
  N-term Ac
  MOD_RES (4)..(4): Alpha-Me R-azide 1,4 triazole (6 carbon) alanine olefin amino acid connected by an all-carbon crosslinker comprising one double bond
  misc_feature (4)..(11): Crosslink between residues
  MOD_RES (11)..(11): Alpha-Me alkyne 1,4 triazole (5 carbon) alanine olefin amino acid connected by an all-carbon crosslinker comprising one double bond
  MOD_RES (17)..(17): D-amino acid
  C-term NH2
ETFAEYWAQLAAAAAAA

SEQ ID NO: 1824 - protein, 18 aa, Artificial Sequence
  Description of Artificial Sequence: Synthetic peptide
  N-term Ac
  MOD_RES (4)..(4): Alpha-Me R-azide 1,4 triazole (6 carbon) alanine olefin amino acid connected by an all-carbon crosslinker comprising one double bond
  misc_feature (4)..(11): Crosslink between residues
  MOD_RES (11)..(11): Alpha-Me alkyne 1,4 triazole (5 carbon) alanine olefin amino acid connected by an all-carbon crosslinker comprising one double bond
  MOD_RES (18)..(18): D-amino acid
  C-term NH2
LTFAEYWAQLAAAAAAAA

SEQ ID NO: 1825 - protein, 18 aa, Artificial Sequence
  Description of Artificial Sequence: Synthetic peptide
  N-term Ac
  MOD_RES (4)..(4): Alpha-Me R-azide 1,4 triazole (6 carbon) alanine olefin amino acid connected by an all-carbon crosslinker comprising one double bond
  misc_feature (4)..(11): Crosslink between residues
  MOD_RES (11)..(11): Alpha-Me alkyne 1,4 triazole (5 carbon) alanine olefin amino acid connected by an all-carbon crosslinker comprising one double bond
  MOD_RES (18)..(18): D-amino acid
  C-term NH2
LTFAEYWAQLAAAAAAAA

SEQ ID NO: 1826 - protein, 17 aa, Artificial Sequence
  Description of Artificial Sequence: Synthetic peptide
  N-term Ac
  MOD_RES (4)..(4): Alpha-Me R-azide 1,4 triazole (6 carbon) alanine olefin amino acid connected by an all-carbon crosslinker comprising one double bond
  misc_feature (4)..(11): Crosslink between residues
  MOD_RES (11)..(11): Alpha-Me alkyne 1,4 triazole (5 carbon) alanine olefin amino acid connected by an all-carbon crosslinker comprising one double bond
  MOD_RES (14)..(14): Norleucine
  MOD_RES (17)..(17): D-amino acid
  C-term NH2
LTFAAYWAQLAAALAAA

SEQ ID NO: 1827 - protein, 17 aa, Artificial Sequence
  Description of Artificial Sequence: Synthetic peptide
  N-term Ac
  MOD_RES (4)..(4): Alpha-Me R-azide 1,4 triazole (6 carbon) alanine olefin amino acid connected by an all-carbon crosslinker comprising one double bond
  misc_feature (4)..(11): Crosslink between residues
  MOD_RES (11)..(11): Alpha-Me alkyne 1,4 triazole (5 carbon) alanine olefin amino acid connected by an all-carbon crosslinker comprising one double bond
  MOD_RES (14)..(14): Norleucine
  MOD_RES (17)..(17): D-amino acid
  C-term NH2
LTFAAYWAQLAAALAAA

SEQ ID NO: 1828 - protein, 17 aa, Artificial Sequence
  Description of Artificial Sequence: Synthetic peptide
  N-term Ac
  MOD_RES (4)..(4): Alpha-Me R-azide 1,4 triazole (6 carbon) alanine olefin amino acid connected by an all-carbon crosslinker comprising one double bond
  misc_feature (4)..(11): Crosslink between residues
  MOD_RES (10)..(10): Cyclobutyl-Ala
  MOD_RES (11)..(11): Alpha-Me alkyne 1,4 triazole (5 carbon) alanine olefin amino acid connected by an all-carbon crosslinker comprising one double bond
  MOD_RES (17)..(17): D-amino acid
  C-term NH2
LTFAEYWAQAAAAAAAA

SEQ ID NO: 1829 - protein, 17 aa, Artificial Sequence
  Description of Artificial Sequence: Synthetic peptide
  N-term Ac
  MOD_RES (4)..(4): Alpha-Me R-azide 1,4 triazole (6 carbon) alanine olefin amino acid connected by an all-carbon crosslinker comprising one double bond
  misc_feature (4)..(11): Crosslink between residues
  MOD_RES (10)..(10): Cyclobutyl-Ala
  MOD_RES (11)..(11): Alpha-Me alkyne 1,4 triazole (5 carbon) alanine olefin amino acid connected by an all-carbon crosslinker comprising one double bond
  MOD_RES (17)..(17): D-amino acid
  C-term NH2
LTFAEYWAQAAAAAAAA

SEQ ID NO: 1830 - protein, 17 aa, Artificial Sequence
  Description of Artificial Sequence: Synthetic peptide
  N-term Ac
  MOD_RES (4)..(4): Alpha-Me R-azide 1,4 triazole (6 carbon) alanine olefin amino acid connected by an all-carbon crosslinker comprising one double bond
  misc_feature (4)..(11): Crosslink between residues
  MOD_RES (6)..(6): 4-carboxy-Phe
  MOD_RES (10)..(10): Cyclobutyl-Ala
  MOD_RES (11)..(11): Alpha-Me alkyne 1,4 triazole (5 carbon) alanine olefin amino acid connected by an all-carbon crosslinker comprising one double bond
  MOD_RES (17)..(17): D-amino acid
  C-term NH2
LTFAEFWAQAAAAAAAA

SEQ ID NO: 1831 - protein, 17 aa, Artificial Sequence
  Description of Artificial Sequence: Synthetic peptide
  N-term Ac
  MOD_RES (4)..(4): Alpha-Me R-azide 1,4 triazole (6 carbon) alanine olefin amino acid connected by an all-carbon crosslinker comprising one double bond
  misc_feature (4)..(11): Crosslink between residues
  MOD_RES (6)..(6): 4-carboxy-Phe
  MOD_RES (10)..(10): Cyclobutyl-Ala
  MOD_RES (11)..(11): Alpha-Me alkyne 1,4 triazole (5 carbon) alanine olefin amino acid connected by an all-carbon crosslinker comprising one double bond
  MOD_RES (17)..(17): D-amino acid
  C-term NH2
LTFAEFWAQAAAAAAAA

SEQ ID NO: 1832 - protein, 17 aa, Artificial Sequence
  Description of Artificial Sequence: Synthetic peptide
  N-term Ac
  MOD_RES (4)..(4): Alpha-Me R-azide 1,4 triazole (6 carbon) alanine olefin amino acid connected by an all-carbon crosslinker comprising one double bond
  misc_feature (4)..(11): Crosslink between residues
  MOD_RES (10)..(10): Cyclobutyl-Ala
  MOD_RES (11)..(11): Alpha-Me alkyne 1,4 triazole (5 carbon) alanine olefin amino acid connected by an all-carbon crosslinker comprising one double bond
  MOD_RES (17)..(17): D-amino acid
  C-term NH2
LTFAEYWSQAAAAAAAA

SEQ ID NO: 1833 - protein, 17 aa, Artificial Sequence
  Description of Artificial Sequence: Synthetic peptide
  N-term Ac
  MOD_RES (4)..(4): Alpha-Me R-azide 1,4 triazole (6 carbon) alanine olefin amino acid connected by an all-carbon crosslinker comprising one double bond
  misc_feature (4)..(11): Crosslink between residues
  MOD_RES (10)..(10): Cyclobutyl-Ala
  MOD_RES (11)..(11): Alpha-Me alkyne 1,4 triazole (5 carbon) alanine olefin amino acid connected by an all-carbon crosslinker comprising one double bond
  MOD_RES (17)..(17): D-amino acid
  C-term NH2
LTFAEYWSQAAAAAAAA

SEQ ID NO: 1834 - protein, 15 aa, Artificial Sequence
  Description of Artificial Sequence: Synthetic peptide
  N-term Ac
  MOD_RES (4)..(4): Alpha-Me R-azide 1,4 triazole (6 carbon) alanine olefin amino acid connected by an all-carbon crosslinker comprising one double bond
  misc_feature (4)..(11): Crosslink between residues
  MOD_RES (10)..(10): Cyclobutyl-Ala
  MOD_RES (11)..(11): Alpha-Me alkyne 1,4 triazole (5 carbon) alanine olefin amino acid connected by an all-carbon crosslinker comprising one double bond
  MOD_RES (15)..(15): D-amino acid
  C-term NH2
LTFAEYWAQAASAAA

SEQ ID NO: 1835 - protein, 15 aa, Artificial Sequence
  Description of Artificial Sequence: Synthetic peptide
  N-term Ac
  MOD_RES (4)..(4): Alpha-Me R-azide 1,4 triazole (6 carbon) alanine olefin amino acid connected by an all-carbon crosslinker comprising one double bond
  misc_feature (4)..(11): Crosslink between residues
  MOD_RES (10)..(10): Cyclobutyl-Ala
  MOD_RES (11)..(11): Alpha-Me alkyne 1,4 triazole (5 carbon) alanine olefin amino acid connected by an all-carbon crosslinker comprising one double bond
  MOD_RES (15)..(15): D-amino acid
  C-term NH2
LTFAEYWAQAASAAA

SEQ ID NO: 1836 - protein, 16 aa, Artificial Sequence
  Description of Artificial Sequence: Synthetic peptide
  N-term Ac
  MOD_RES (5)..(5): Alpha-Me R-azide 1,4 triazole (6 carbon) alanine olefin amino acid connected by an all-carbon crosslinker comprising one double bond
  misc_feature (5)..(12): Crosslink between residues
  MOD_RES (11)..(11): Cyclobutyl-Ala
  MOD_RES (12)..(12): Alpha-Me alkyne 1,4 triazole (5 carbon) alanine olefin amino acid connected by an all-carbon crosslinker comprising one double bond
  MOD_RES (16)..(16): D-amino acid
  C-term NH2
ALTFAEYWAQAASAAA

SEQ ID NO: 1837 - protein, 16 aa, Artificial Sequence
  Description of Artificial Sequence: Synthetic peptide
  N-term Ac
  MOD_RES (5)..(5): Alpha-Me R-azide 1,4 triazole (6 carbon) alanine olefin amino acid connected by an all-carbon crosslinker comprising one double bond
  misc_feature (5)..(12): Crosslink between residues
  MOD_RES (11)..(11): Cyclobutyl-Ala
  MOD_RES (12)..(12): Alpha-Me alkyne 1,4 triazole (5 carbon) alanine olefin amino acid connected by an all-carbon crosslinker comprising one double bond
  MOD_RES (16)..(16): D-amino acid
  C-term NH2
ALTFAEYWAQAASAAA

SEQ ID NO: 1838 - protein, 17 aa, Artificial Sequence
  Description of Artificial Sequence: Synthetic peptide
  N-term Ac
  MOD_RES (5)..(5): Alpha-Me R-azide 1,4 triazole (6 carbon) alanine olefin amino acid connected by an all-carbon crosslinker comprising one double bond
  misc_feature (5)..(12): Crosslink between residues
  MOD_RES (11)..(11): Cyclobutyl-Ala
  MOD_RES (12)..(12): Alpha-Me alkyne 1,4 triazole (5 carbon) alanine olefin amino acid connected by an all-carbon crosslinker comprising one double bond
  MOD_RES (17)..(17): D-amino acid
  C-term NH2
ALTFAEYWAQAASAAAA

SEQ ID NO: 1839 - protein, 17 aa, Artificial Sequence
  Description of Artificial Sequence: Synthetic peptide
  N-term Ac
  MOD_RES (5)..(5): Alpha-Me R-azide 1,4 triazole (6 carbon) alanine olefin amino acid connected by an all-carbon crosslinker comprising one double bond
  misc_feature (5)..(12): Crosslink between residues
  MOD_RES (11)..(11): Cyclobutyl-Ala
  MOD_RES (12)..(12): Alpha-Me alkyne 1,4 triazole (5 carbon) alanine olefin amino acid connected by an all-carbon crosslinker comprising one double bond
  MOD_RES (17)..(17): D-amino acid
  C-term NH2
ALTFAEYWAQAASAAAA

SEQ ID NO: 1840 - protein, 18 aa, Artificial Sequence
  Description of Artificial Sequence: Synthetic peptide
  N-term Ac
  MOD_RES (6)..(6): Alpha-Me R-azide 1,4 triazole (6 carbon) alanine olefin amino acid connected by an all-carbon crosslinker comprising one double bond
  misc_feature (6)..(13): Crosslink between residues
  MOD_RES (12)..(12): Cyclobutyl-Ala
  MOD_RES (13)..(13): Alpha-Me alkyne 1,4 triazole (5 carbon) alanine olefin amino acid connected by an all-carbon crosslinker comprising one double bond
  MOD_RES (18)..(18): D-amino acid
  C-term NH2
AALTFAEYWAQAASAAAA

SEQ ID NO: 1841 - protein, 18 aa, Artificial Sequence
  Description of Artificial Sequence: Synthetic peptide
  N-term Ac
  MOD_RES (6)..(6): Alpha-Me R-azide 1,4 triazole (6 carbon) alanine olefin amino acid connected by an all-carbon crosslinker comprising one double bond
  misc_feature (6)..(13): Crosslink between residues
  MOD_RES (12)..(12): Cyclobutyl-Ala
  MOD_RES (13)..(13): Alpha-Me alkyne 1,4 triazole (5 carbon) alanine olefin amino acid connected by an all-carbon crosslinker comprising one double bond
  MOD_RES (18)..(18): D-amino acid
  C-term NH2
AALTFAEYWAQAASAAAA

SEQ ID NO: 1842 - protein, 14 aa, Artificial Sequence
  Description of Artificial Sequence: Synthetic peptide
  N-term Ac
  MOD_RES (4)..(4): Alpha-Me R-azide 1,4 triazole (6 carbon) alanine olefin amino acid connected by an all-carbon crosslinker comprising one double bond
  misc_feature (4)..(11): Crosslink between residues
  MOD_RES (10)..(10): Cyclobutyl-Ala
  MOD_RES (11)..(11): Alpha-Me alkyne 1,4 triazole (5 carbon) alanine olefin amino acid connected by an all-carbon crosslinker comprising one double bond
  C-term NH2
RTFAEYWAQAASAA

SEQ ID NO: 1843 - protein, 14 aa, Artificial Sequence
  Description of Artificial Sequence: Synthetic peptide
  N-term Ac
  MOD_RES (4)..(4): Alpha-Me R-azide 1,4 triazole (6 carbon) alanine olefin amino acid connected by an all-carbon crosslinker comprising one double bond
  misc_feature (4)..(11): Crosslink between residues
  MOD_RES (10)..(10): Cyclobutyl-Ala
  MOD_RES (11)..(11): Alpha-Me alkyne 1,4 triazole (5 carbon) alanine olefin amino acid connected by an all-carbon crosslinker comprising one double bond
  C-term NH2
LRFAEYWAQAASAA

SEQ ID NO: 1844 - protein, 14 aa, Artificial Sequence
  Description of Artificial Sequence: Synthetic peptide
  N-term Ac
  MOD_RES (4)..(4): Alpha-Me R-azide 1,4 triazole (6 carbon) alanine olefin amino acid connected by an all-carbon crosslinker comprising one double bond
  misc_feature (4)..(11): Crosslink between residues
  MOD_RES (10)..(10): Cyclobutyl-Ala
  MOD_RES (11)..(11): Alpha-Me alkyne 1,4 triazole (5 carbon) alanine olefin amino acid connected by an all-carbon crosslinker comprising one double bond
  C-term NH2
LTFAEYWRQAASAA

SEQ ID NO: 1845 - protein, 14 aa, Artificial Sequence
  Description of Artificial Sequence: Synthetic peptide
  N-term Ac
  MOD_RES (4)..(4): Alpha-Me R-azide 1,4 triazole (6 carbon) alanine olefin amino acid connected by an all-carbon crosslinker comprising one double bond
  misc_feature (4)..(11): Crosslink between residues
  MOD_RES (10)..(10): Cyclobutyl-Ala
  MOD_RES (11)..(11): Alpha-Me alkyne 1,4 triazole (5 carbon) alanine olefin amino acid connected by an all-carbon crosslinker comprising one double bond
  C-term NH2
LTFAEYWARAASAA

SEQ ID NO: 1846 - protein, 14 aa, Artificial Sequence
  Description of Artificial Sequence: Synthetic peptide
  N-term Ac
  MOD_RES (4)..(4): Alpha-Me R-azide 1,4 triazole (6 carbon) alanine olefin amino acid connected by an all-carbon crosslinker comprising one double bond
  misc_feature (4)..(11): Crosslink between residues
  MOD_RES (10)..(10): Cyclobutyl-Ala
  MOD_RES (11)..(11): Alpha-Me alkyne 1,4 triazole (5 carbon) alanine olefin amino acid connected by an all-carbon crosslinker comprising one double bond
  C-term NH2
LTFAEYWAQAARAA

SEQ ID NO: 1847 - protein, 14 aa, Artificial Sequence
  Description of Artificial Sequence: Synthetic peptide
  N-term Ac
  MOD_RES (4)..(4): Alpha-Me R-azide 1,4 triazole (6 carbon) alanine olefin amino acid connected by an all-carbon crosslinker comprising one double bond
  misc_feature (4)..(11): Crosslink between residues
  MOD_RES (10)..(10): Cyclobutyl-Ala
  MOD_RES (11)..(11): Alpha-Me alkyne 1,4 triazole (5 carbon) alanine olefin amino acid connected by an all-carbon crosslinker comprising one double bond
  C-term NH2
LTFAEYWAQAASRA

SEQ ID NO: 1848 - protein, 14 aa, Artificial Sequence
  Description of Artificial Sequence: Synthetic peptide
  N-term Ac
  MOD_RES (4)..(4): Alpha-Me R-azide 1,4 triazole (6 carbon) alanine olefin amino acid connected by an all-carbon crosslinker comprising one double bond
  misc_feature (4)..(11): Crosslink between residues
  MOD_RES (10)..(10): Cyclobutyl-Ala
  MOD_RES (11)..(11): Alpha-Me alkyne 1,4 triazole (5 carbon) alanine olefin amino acid connected by an all-carbon crosslinker comprising one double bond
  C-term NH2
LTFAEYWAQAASAR

SEQ ID NO: 1849 - protein, 16 aa, Artificial Sequence
  Description of Artificial Sequence: Synthetic peptide
  N-term 5-FAM
  MOD_RES (1)..(1): Beta-Ala
  MOD_RES (5)..(5): Alpha-Me R-azide 1,4 triazole (6 carbon) alanine olefin amino acid connected by an all-carbon crosslinker comprising one double bond
  misc_feature (5)..(12): Crosslink between residues
  MOD_RES (12)..(12): Alpha-Me alkyne 1,4 triazole (5 carbon) alanine olefin amino acid connected by an all-carbon crosslinker comprising one double bond
  MOD_RES (15)..(15): Norleucine
  C-term NH2
ALTFAAYWAQLAAALA

SEQ ID NO: 1850 - protein, 15 aa, Artificial Sequence
  Description of Artificial Sequence: Synthetic peptide
  N-term Ac
  MOD_RES (4)..(4): Alpha-Me R-azide 1,4 triazole (6 carbon) alanine olefin amino acid connected by an all-carbon crosslinker comprising one double bond
  misc_feature (4)..(11): Crosslink between residues
  MOD_RES (11)..(11): Alpha-Me alkyne 1,4 triazole (5 carbon) alanine olefin amino acid connected by an all-carbon crosslinker comprising one double bond
  MOD_RES (14)..(14): Norleucine
  C-term NH2
LAFAEYWAQLAAALA

SEQ ID NO: 1851 - protein, 15 aa, Artificial Sequence
  Description of Artificial Sequence: Synthetic peptide
  N-term Ac
  MOD_RES (4)..(4): Alpha-Me R-azide 1,4 triazole (6 carbon) alanine olefin amino acid connected by an all-carbon crosslinker comprising one double bond
  misc_feature (4)..(11): Crosslink between residues
  MOD_RES (11)..(11): Alpha-Me alkyne 1,4 triazole (5 carbon) alanine olefin amino acid connected by an all-carbon crosslinker comprising one double bond
  MOD_RES (14)..(14): Norleucine
  C-term NH2
ATFAEYWAQLAAALA

SEQ ID NO: 1852 - protein, 15 aa, Artificial Sequence
  Description of Artificial Sequence: Synthetic peptide
  N-term Ac
  MOD_RES (4)..(4): Alpha-Me R-azide 1,4 triazole (6 carbon) alanine olefin amino acid connected by an all-carbon crosslinker comprising one double bond
  misc_feature (4)..(11): Crosslink between residues
  MOD_RES (11)..(11): Alpha-Me alkyne 1,4 triazole (5 carbon) alanine olefin amino acid connected by an all-carbon crosslinker comprising one double bond
  MOD_RES (14)..(14): Norleucine
  C-term NH2
AAFAEYWAQLAAALA

SEQ ID NO: 1853 - protein, 16 aa, Artificial Sequence
  Description of Artificial Sequence: Synthetic peptide
  N-term Ac
  MOD_RES (5)..(5): Alpha-Me R-azide 1,4 triazole (6 carbon) alanine olefin amino acid connected by an all-carbon crosslinker comprising one double bond
  misc_feature (5)..(12): Crosslink between residues
  MOD_RES (12)..(12): Alpha-Me alkyne 1,4 triazole (5 carbon) alanine olefin amino acid connected by an all-carbon crosslinker comprising one double bond
  MOD_RES (15)..(15): Norleucine
  C-term NH2
AAAFAEYWAQLAAALA

SEQ ID NO: 1854 - protein, 17 aa, Artificial Sequence
  Description of Artificial Sequence: Synthetic peptide
  N-term Ac
  MOD_RES (6)..(6): Alpha-Me R-azide 1,4 triazole (6 carbon) alanine olefin amino acid connected by an all-carbon crosslinker comprising one double bond
  misc_feature (6)..(13): Crosslink between residues
  MOD_RES (13)..(13): Alpha-Me alkyne 1,4 triazole (5 carbon) alanine olefin amino acid connected by an all-carbon crosslinker comprising one double bond
  MOD_RES (16)..(16): Norleucine
  C-term NH2
AAAAFAEYWAQLAAALA

SEQ ID NO: 1855 - protein, 16 aa, Artificial Sequence
  Description of Artificial Sequence: Synthetic peptide
  N-term Ac
  MOD_RES (5)..(5): Alpha-Me R-azide 1,4 triazole (6 carbon) alanine olefin amino acid connected by an all-carbon crosslinker comprising one double bond
  misc_feature (5)..(12): Crosslink between residues
  MOD_RES (12)..(12): Alpha-Me alkyne 1,4 triazole (5 carbon) alanine olefin amino acid connected by an all-carbon crosslinker comprising one double bond
  MOD_RES (15)..(15): Norleucine
  C-term NH2
AATFAEYWAQLAAALA

SEQ ID NO: 1856 - protein, 17 aa, Artificial Sequence
  Description of Artificial Sequence: Synthetic peptide
  N-term Ac
  MOD_RES (6)..(6): Alpha-Me R-azide 1,4 triazole (6 carbon) alanine olefin amino acid connected by an all-carbon crosslinker comprising one double bond
  misc_feature (6)..(13): Crosslink between residues
  MOD_RES (13)..(13): Alpha-Me alkyne 1,4 triazole (5 carbon) alanine olefin amino acid connected by an all-carbon crosslinker comprising one double bond
  MOD_RES (16)..(16): Norleucine
  C-term NH2
AALTFAEYWAQLAAALA

SEQ ID NO: 1857 - protein, 18 aa, Artificial Sequence
  Description of Artificial Sequence: Synthetic peptide
  N-term Ac
  MOD_RES (7)..(7): Alpha-Me R-azide 1,4 triazole (6 carbon) alanine olefin amino acid connected by an all-carbon crosslinker comprising one double bond
  misc_feature (7)..(14): Crosslink between residues
  MOD_RES (14)..(14): Alpha-Me alkyne 1,4 triazole (5 carbon) alanine olefin amino acid connected by an all-carbon crosslinker comprising one double bond
  MOD_RES (18)..(18): Norleucine
  C-term NH2
AAALTFAEYWAQLAAALA

SEQ ID NO: 1858 - protein, 16 aa, Artificial Sequence
  Description of Artificial Sequence: Synthetic peptide
  N-term Ac
  MOD_RES (4)..(4): Alpha-Me R-azide 1,4 triazole (6 carbon) alanine olefin amino acid connected by an all-carbon crosslinker comprising one double bond
  misc_feature (4)..(11): Crosslink between residues
  MOD_RES (11)..(11): Alpha-Me alkyne 1,4 triazole (5 carbon) alanine olefin amino acid connected by an all-carbon crosslinker comprising one double bond
  MOD_RES (14)..(14): Norleucine
  C-term NH2
LTFAEYWAQLAAALAA

SEQ ID NO: 1859 - protein, 17 aa, Artificial Sequence
  Description of Artificial Sequence: Synthetic peptide
  N-term Ac
  MOD_RES (5)..(5): Alpha-Me R-azide 1,4 triazole (6 carbon) alanine olefin amino acid connected by an all-carbon crosslinker comprising one double bond
  misc_feature (5)..(12): Crosslink between residues
  MOD_RES (12)..(12): Alpha-Me alkyne 1,4 triazole (5 carbon) alanine olefin amino acid connected by an all-carbon crosslinker comprising one double bond
  MOD_RES (15)..(15): Norleucine
  C-term NH2
ALTFAEYWAQLAAALAA

SEQ ID NO: 1860 - protein, 18 aa, Artificial Sequence
  Description of Artificial Sequence: Synthetic peptide
  N-term Ac
  MOD_RES (6)..(6): Alpha-Me R-azide 1,4 triazole (6 carbon) alanine olefin amino acid connected by an all-carbon crosslinker comprising one double bond
  misc_feature (6)..(13): Crosslink between residues
  MOD_RES (13)..(13): Alpha-Me alkyne 1,4 triazole (5 carbon) alanine olefin amino acid connected by an all-carbon crosslinker comprising one double bond
  MOD_RES (16)..(16): Norleucine
  C-term NH2
AALTFAEYWAQLAAALAA

SEQ ID NO: 1861 - protein, 16 aa, Artificial Sequence
  Description of Artificial Sequence: Synthetic peptide
  N-term Ac
  MOD_RES (4)..(4): Alpha-Me R-azide 1,4 triazole (6 carbon) alanine olefin amino acid connected by an all-carbon crosslinker comprising one double bond
  misc_feature (4)..(11): Crosslink between residues
  MOD_RES (10)..(10): Cyclobutyl-Ala
  MOD_RES (11)..(11): Alpha-Me alkyne 1,4 triazole (5 carbon) alanine olefin amino acid connected by an all-carbon crosslinker comprising one double bond
  MOD_RES (14)..(14): Norleucine
  C-term NH2
LTFAEYWAQAAAALAA

SEQ ID NO: 1862 - protein, 16 aa, Artificial Sequence
  Description of Artificial Sequence: Synthetic peptide
  N-term Ac
  MOD_RES (4)..(4): Alpha-Me R-azide 1,4 triazole (6 carbon) alanine olefin amino acid connected by an all-carbon crosslinker comprising one double bond
  misc_feature (4)..(11): Crosslink between residues
  MOD_RES (10)..(10): homo-Leu
  MOD_RES (11)..(11): Alpha-Me alkyne 1,4 triazole (5 carbon) alanine olefin amino acid connected by an all-carbon crosslinker comprising one double bond
  MOD_RES (14)..(14): Norleucine
  C-term NH2
LTFAEYWAQLAAALAA

SEQ ID NO: 1863 - protein, 17 aa, Artificial Sequence
  Description of Artificial Sequence: Synthetic peptide
  N-term Ac
  MOD_RES (5)..(5): Alpha-Me R-azide 1,4 triazole (6 carbon) alanine olefin amino acid connected by an all-carbon crosslinker comprising one double bond
  misc_feature (5)..(12): Crosslink between residues
  MOD_RES (11)..(11): homo-Leu
  MOD_RES (12)..(12): Alpha-Me alkyne 1,4 triazole (5 carbon) alanine olefin amino acid connected by an all-carbon crosslinker comprising one double bond
  MOD_RES (15)..(15): Norleucine
  C-term NH2
ALTFAEYWAQLAAALAA

SEQ ID NO: 1864 - protein, 15 aa, Artificial Sequence
  Description of Artificial Sequence: Synthetic peptide
  N-term Ac
  MOD_RES (4)..(4): Alpha-Me R-azide 1,4 triazole (6 carbon) alanine olefin amino acid connected by an all-carbon crosslinker comprising one double bond
  misc_feature (4)..(11): Crosslink between residues
  MOD_RES (6)..(6): N-methyl-Tyr
  MOD_RES (11)..(11): Alpha-Me alkyne 1,4 triazole (5 carbon) alanine olefin amino acid connected by an all-carbon crosslinker comprising one double bond
  MOD_RES (14)..(14): Norleucine
  C-term NH2
LTFAAYWAQLAAALA

SEQ ID NO: 1865 - protein, 15 aa, Artificial Sequence
  Description of Artificial Sequence: Synthetic peptide
  N-term Ac
  MOD_RES (4)..(4): Alpha-Me R-azide 1,4 triazole (6 carbon) alanine olefin amino acid connected by an all-carbon crosslinker comprising one double bond
  misc_feature (4)..(11): Crosslink between residues
  MOD_RES (6)..(6): N-methyl-Tyr
  MOD_RES (11)..(11): Alpha-Me alkyne 1,4 triazole (5 carbon) alanine olefin amino acid connected by an all-carbon crosslinker comprising one double bond
  MOD_RES (14)..(14): Norleucine
  C-term NH2
LTFAAYWAQLAAALA

SEQ ID NO: 1866 - protein, 15 aa, Artificial Sequence
  Description of Artificial Sequence: Synthetic peptide
  N-term Ac
  MOD_RES (4)..(4): Alpha-Me R-azide 1,4 triazole (6 carbon) alanine olefin amino acid connected by an all-carbon crosslinker comprising one double bond
  misc_feature (4)..(11): Crosslink between residues
  MOD_RES (7)..(7): N-methyl-Trp
  MOD_RES (11)..(11): Alpha-Me alkyne 1,4 triazole (5 carbon) alanine olefin amino acid connected by an all-carbon crosslinker comprising one double bond
  MOD_RES (14)..(14): Norleucine
  C-term NH2
LTFAAYWAQLAAALA

SEQ ID NO: 1867 - protein, 15 aa, Artificial Sequence
  Description of Artificial Sequence: Synthetic peptide
  N-term Ac
  MOD_RES (4)..(4): Alpha-Me R-azide 1,4 triazole (6 carbon) alanine olefin amino acid connected by an all-carbon crosslinker comprising one double bond
  misc_feature (4)..(11): Crosslink between residues
  MOD_RES (7)..(7): N-methyl-Trp
  MOD_RES (11)..(11): Alpha-Me alkyne 1,4 triazole (5 carbon) alanine olefin amino acid connected by an all-carbon crosslinker comprising one double bond
  MOD_RES (14)..(14): Norleucine
  C-term NH2
LTFAAYWAQLAAALA

SEQ ID NO: 1868 - protein, 15 aa, Artificial Sequence
  Description of Artificial Sequence: Synthetic peptide
  N-term Ac
  MOD_RES (4)..(4): Alpha-Me R-azide 1,4 triazole (6 carbon) alanine olefin amino acid connected by an all-carbon crosslinker comprising one double bond
  misc_feature (4)..(11): Crosslink between residues
  MOD_RES (7)..(7): Alpha-Me-Trp
  MOD_RES (11)..(11): Alpha-Me alkyne 1,4 triazole (5 carbon) alanine olefin amino acid connected by an all-carbon crosslinker comprising one double bond
  MOD_RES (14)..(14): Norleucine
  C-term NH2
LTFAAYWAQLAAALA

SEQ ID NO: 1869 - protein, 15 aa, Artificial Sequence
  Description of Artificial Sequence: Synthetic peptide
  N-term Ac
  MOD_RES (4)..(4): Alpha-Me R-azide 1,4 triazole (6 carbon) alanine olefin amino acid connected by an all-carbon crosslinker comprising one double bond
  misc_feature (4)..(11): Crosslink between residues
  MOD_RES (7)..(7): Alpha-Me-Trp
  MOD_RES (11)..(11): Alpha-Me alkyne 1,4 triazole (5 carbon) alanine olefin amino acid connected by an all-carbon crosslinker comprising one double bond
  MOD_RES (14)..(14): Norleucine
  C-term NH2
LTFAAYWAQLAAALA

SEQ ID NO: 1870 - protein, 15 aa, Artificial Sequence
  Description of Artificial Sequence: Synthetic peptide
  N-term Ac
  MOD_RES (4)..(4): Alpha-Me R-azide 1,4 triazole (6 carbon) alanine olefin amino acid connected by an all-carbon crosslinker comprising one double bond
  misc_feature (4)..(11): Crosslink between residues
  MOD_RES (8)..(8): 2-aminoisobutyric acid
  MOD_RES (11)..(11): Alpha-Me alkyne 1,4 triazole (5 carbon) alanine olefin amino acid connected by an all-carbon crosslinker comprising one double bond
  MOD_RES (14)..(14): Norleucine
  C-term NH2
LTFAAYWXQLAAALA

SEQ ID NO: 1871 - protein, 15 aa, Artificial Sequence
  Description of Artificial Sequence: Synthetic peptide
  N-term Ac
  MOD_RES (4)..(4): Alpha-Me R-azide 1,4 triazole (6 carbon) alanine olefin amino acid connected by an all-carbon crosslinker comprising one double bond
  misc_feature (4)..(11): Crosslink between residues
  MOD_RES (8)..(8): 2-aminoisobutyric acid
  MOD_RES (11)..(11): Alpha-Me alkyne 1,4 triazole (5 carbon) alanine olefin amino acid connected by an all-carbon crosslinker comprising one double bond
  MOD_RES (14)..(14): Norleucine
  C-term NH2
LTFAAYWXQLAAALA

SEQ ID NO: 1872 - protein, 15 aa, Artificial Sequence
  Description of Artificial Sequence: Synthetic peptide
  N-term Ac
  MOD_RES (4)..(4): Alpha-Me R-azide 1,4 triazole (6 carbon) alanine olefin amino acid connected by an all-carbon crosslinker comprising one double bond
  misc_feature (4)..(11): Crosslink between residues
  MOD_RES (11)..(11): Alpha-Me alkyne 1,4 triazole (5 carbon) alanine olefin amino acid connected by an all-carbon crosslinker comprising one double bond
  MOD_RES (13)..(13): 2-aminoisobutyric acid
  MOD_RES (14)..(14): Norleucine
  C-term NH2
LTFAAYWAQLAAXLA

SEQ ID NO: 1873 - protein, 15 aa, Artificial Sequence
  Description of Artificial Sequence: Synthetic peptide
  N-term Ac
  MOD_RES (4)..(4): Alpha-Me R-azide 1,4 triazole (6 carbon) alanine olefin amino acid connected by an all-carbon crosslinker comprising one double bond
  misc_feature (4)..(11): Crosslink between residues
  MOD_RES (11)..(11): Alpha-Me alkyne 1,4 triazole (5 carbon) alanine olefin amino acid connected by an all-carbon crosslinker comprising one double bond
  MOD_RES (13)..(13): 2-aminoisobutyric acid
  MOD_RES (14)..(14): Norleucine
  C-term NH2
LTFAAYWAQLAAXLA

SEQ ID NO: 1874 - protein, 15 aa, Artificial Sequence
  Description of Artificial Sequence: Synthetic peptide
  N-term Ac
  MOD_RES (4)..(4): Alpha-Me R-azide 1,4 triazole (6 carbon) alanine olefin amino acid connected by an all-carbon crosslinker comprising one double bond
  misc_feature (4)..(11): Crosslink between residues
  MOD_RES (11)..(11): Alpha-Me alkyne 1,4 triazole (5 carbon) alanine olefin amino acid connected by an all-carbon crosslinker comprising one double bond
  MOD_RES (13)..(13): Sarcosine
  MOD_RES (14)..(14): Norleucine
  C-term NH2
LTFAAYWAQLAAXLA

SEQ ID NO: 1875 - protein, 15 aa, Artificial Sequence
  Description of Artificial Sequence: Synthetic peptide
  N-term Ac
  MOD_RES (4)..(4): Alpha-Me R-azide 1,4 triazole (6 carbon) alanine olefin amino acid connected by an all-carbon crosslinker comprising one double bond
  misc_feature (4)..(11): Crosslink between residues
  MOD_RES (11)..(11): Alpha-Me alkyne 1,4 triazole (5 carbon) alanine olefin amino acid connected by an all-carbon crosslinker comprising one double bond
  MOD_RES (13)..(13): Sarcosine
  MOD_RES (14)..(14): Norleucine
  C-term NH2
LTFAAYWAQLAAXLA

SEQ ID NO: 1876 - protein, 15 aa, Artificial Sequence
  Description of Artificial Sequence: Synthetic peptide
  N-term Ac
  MOD_RES (4)..(4): Alpha-Me R-azide 1,4 triazole (6 carbon) alanine olefin amino acid connected by an all-carbon crosslinker comprising one double bond
  misc_feature (4)..(11): Crosslink between residues
  MOD_RES (11)..(11): Alpha-Me alkyne 1,4 triazole (5 carbon) alanine olefin amino acid connected by an all-carbon crosslinker comprising one double bond
  MOD_RES (14)..(14): Norleucine
  MOD_RES (15)..(15): 2-aminoisobutyric acid
  C-term NH2
LTFAAYWAQLAAALX

SEQ ID NO: 1877 - protein, 15 aa, Artificial Sequence
  Description of Artificial Sequence: Synthetic peptide
  N-term Ac
  MOD_RES (4)..(4): Alpha-Me R-azide 1,4 triazole (6 carbon) alanine olefin amino acid connected by an all-carbon crosslinker comprising one double bond
  misc_feature (4)..(11): Crosslink between residues
  MOD_RES (11)..(11): Alpha-Me alkyne 1,4 triazole (5 carbon) alanine olefin amino acid connected by an all-carbon crosslinker comprising one double bond
  MOD_RES (14)..(14): Norleucine
  MOD_RES (15)..(15): 2-aminoisobutyric acid
  C-term NH2
LTFAAYWAQLAAALX

SEQ ID NO: 1878 - protein, 15 aa, Artificial Sequence
  Description of Artificial Sequence: Synthetic peptide
  N-term Ac
  MOD_RES (4)..(4): Alpha-Me R-azide 1,4 triazole (6 carbon) alanine olefin amino acid connected by an all-carbon crosslinker comprising one double bond
  misc_feature (4)..(11): Crosslink between residues
  MOD_RES (11)..(11): Alpha-Me alkyne 1,4 triazole (5 carbon) alanine olefin amino acid connected by an all-carbon crosslinker comprising one double bond
  MOD_RES (14)..(14): Norleucine
  MOD_RES (15)..(15): N-methyl-Ala
  C-term NH2
LTFAAYWAQLAAALA

SEQ ID NO: 1879 - protein, 15 aa, Artificial Sequence
  Description of Artificial Sequence: Synthetic peptide
  N-term Ac
  MOD_RES (4)..(4): Alpha-Me R-azide 1,4 triazole (6 carbon) alanine olefin amino acid connected by an all-carbon crosslinker comprising one double bond
  misc_feature (4)..(11): Crosslink between residues
  MOD_RES (11)..(11): Alpha-Me alkyne 1,4 triazole (5 carbon) alanine olefin amino acid connected by an all-carbon crosslinker comprising one double bond
  MOD_RES (14)..(14): Norleucine
  MOD_RES (15)..(15): N-methyl-Ala
  C-term NH2
LTFAAYWAQLAAALA

SEQ ID NO: 1880 - protein, 15 aa, Artificial Sequence
  Description of Artificial Sequence: Synthetic peptide
  N-term Ac
  MOD_RES (4)..(4): Alpha-Me R-azide 1,4 triazole (6 carbon) alanine olefin amino acid connected by an all-carbon crosslinker comprising one double bond
  misc_feature (4)..(11): Crosslink between residues
  MOD_RES (11)..(11): Alpha-Me alkyne 1,4 triazole (5 carbon) alanine olefin amino acid connected by an all-carbon crosslinker comprising one double bond
  MOD_RES (14)..(14): Norleucine
  MOD_RES (15)..(15): Sarcosine
  C-term NH2
LTFAAYWAQLAAALX

SEQ ID NO: 1881 - protein, 15 aa, Artificial Sequence
  Description of Artificial Sequence: Synthetic peptide
  N-term Ac
  MOD_RES (4)..(4): Alpha-Me R-azide 1,4 triazole (6 carbon) alanine olefin amino acid connected by an all-carbon crosslinker comprising one double bond
  misc_feature (4)..(11): Crosslink between residues
  MOD_RES (11)..(11): Alpha-Me alkyne 1,4 triazole (5 carbon) alanine olefin amino acid connected by an all-carbon crosslinker comprising one double bond
  MOD_RES (14)..(14): Norleucine
  MOD_RES (15)..(15): Sarcosine
  C-term NH2
LTFAAYWAQLAAALX

SEQ ID NO: 1882 - protein, 16 aa, Artificial Sequence
  Description of Artificial Sequence: Synthetic peptide
  N-term Ac
  MOD_RES (4)..(4): Alpha-Me R-azide 1,4 triazole (6 carbon) alanine olefin amino acid connected by an all-carbon crosslinker comprising one double bond
  misc_feature (4)..(11): Crosslink between residues
  MOD_RES (11)..(11): Alpha-Me alkyne 1,4 triazole (5 carbon) alanine olefin amino acid connected by an all-carbon crosslinker comprising one double bond
  MOD_RES (14)..(14): Norleucine
  MOD_RES (16)..(16): 2-aminoisobutyric acid
  C-term NH2
LTFAAYWAQLAAALAX

SEQ ID NO: 1883 - protein, 16 aa, Artificial Sequence
  Description of Artificial Sequence: Synthetic peptide
  N-term Ac
  MOD_RES (4)..(4): Alpha-Me R-azide 1,4 triazole (6 carbon) alanine olefin amino acid connected by an all-carbon crosslinker comprising one double bond
  misc_feature (4)..(11): Crosslink between residues
  MOD_RES (11)..(11): Alpha-Me alkyne 1,4 triazole (5 carbon) alanine olefin amino acid connected by an all-carbon crosslinker comprising one double bond
  MOD_RES (14)..(14): Norleucine
  MOD_RES (16)..(16): 2-aminoisobutyric acid
  C-term NH2
LTFAAYWAQLAAALAX

SEQ ID NO: 1884 - protein, 16 aa, Artificial Sequence
  Description of Artificial Sequence: Synthetic peptide
  N-term Ac
  MOD_RES (4)..(4): Alpha-Me R-azide 1,4 triazole (6 carbon) alanine olefin amino acid connected by an all-carbon crosslinker comprising one double bond
  misc_feature (4)..(11): Crosslink between residues
  MOD_RES (11)..(11): Alpha-Me alkyne 1,4 triazole (5 carbon) alanine olefin amino acid connected by an all-carbon crosslinker comprising one double bond
  MOD_RES (14)..(14): Norleucine
  MOD_RES (16)..(16): N-methyl-Ala
  C-term NH2
LTFAAYWAQLAAALAA

SEQ ID NO: 1885 - protein, 16 aa, Artificial Sequence
  Description of Artificial Sequence: Synthetic peptide
  N-term Ac
  MOD_RES (4)..(4): Alpha-Me R-azide 1,4 triazole (6 carbon) alanine olefin amino acid connected by an all-carbon crosslinker comprising one double bond
  misc_feature (4)..(11): Crosslink between residues
  MOD_RES (11)..(11): Alpha-Me alkyne 1,4 triazole (5 carbon) alanine olefin amino acid connected by an all-carbon crosslinker comprising one double bond
  MOD_RES (14)..(14): Norleucine
  MOD_RES (16)..(16): N-methyl-Ala
  C-term NH2
LTFAAYWAQLAAALAA

SEQ ID NO: 1886 - protein, 16 aa, Artificial Sequence
  Description of Artificial Sequence: Synthetic peptide
  N-term Ac
  MOD_RES (4)..(4): Alpha-Me R-azide 1,4 triazole (6 carbon) alanine olefin amino acid connected by an all-carbon crosslinker comprising one double bond
  misc_feature (4)..(11): Crosslink between residues
  MOD_RES (11)..(11): Alpha-Me alkyne 1,4 triazole (5 carbon) alanine olefin amino acid connected by an all-carbon crosslinker comprising one double bond
  MOD_RES (14)..(14): Norleucine
  MOD_RES (16)..(16): D-amino acid
  C-term NH2
LTFAAYWAQLAAALAA

SEQ ID NO: 1887 - protein, 16 aa, Artificial Sequence
  Description of Artificial Sequence: Synthetic peptide
  N-term Ac
  MOD_RES (4)..(4): Alpha-Me R-azide 1,4 triazole (6 carbon) alanine olefin amino acid connected by an all-carbon crosslinker comprising one double bond
  misc_feature (4)..(11): Crosslink between residues
  MOD_RES (11)..(11): Alpha-Me alkyne 1,4 triazole (5 carbon) alanine olefin amino acid connected by an all-carbon crosslinker comprising one double bond
  MOD_RES (14)..(14): Norleucine
  MOD_RES (16)..(16): D-amino acid
  C-term NH2
LTFAAYWAQLAAALAA

SEQ ID NO: 1888 - protein, 16 aa, Artificial Sequence
  Description of Artificial Sequence: Synthetic peptide
  N-term Ac
  MOD_RES (4)..(4): Alpha-Me R-azide 1,4 triazole (6 carbon) alanine olefin amino acid connected by an all-carbon crosslinker comprising one double bond
  misc_feature (4)..(11): Crosslink between residues
  MOD_RES (11)..(11): Alpha-Me alkyne 1,4 triazole (5 carbon) alanine olefin amino acid connected by an all-carbon crosslinker comprising one double bond
  MOD_RES (14)..(14): Norleucine
  MOD_RES (16)..(16): Sarcosine
  C-term NH2
LTFAAYWAQLAAALAX

SEQ ID NO: 1889 - protein, 16 aa, Artificial Sequence
  Description of Artificial Sequence: Synthetic peptide
  N-term Ac
  MOD_RES (4)..(4): Alpha-Me R-azide 1,4 triazole (6 carbon) alanine olefin amino acid connected by an all-carbon crosslinker comprising one double bond
  misc_feature (4)..(11): Crosslink between residues
  MOD_RES (11)..(11): Alpha-Me alkyne 1,4 triazole (5 carbon) alanine olefin amino acid connected by an all-carbon crosslinker comprising one double bond
  MOD_RES (14)..(14): Norleucine
  MOD_RES (16)..(16): Sarcosine
  C-term NH2
LTFAAYWAQLAAALAX

SEQ ID NO: 1890 - protein, 15 aa, Artificial Sequence
  Description of Artificial Sequence: Synthetic peptide
  N-term Ac
  MOD_RES (4)..(4): Alpha-Me R-azide 1,4 triazole (6 carbon) alanine olefin amino acid connected by an all-carbon crosslinker comprising one double bond
  misc_feature (4)..(11): Crosslink between residues
  MOD_RES (5)..(5): Cou4
  MOD_RES (11)..(11): Alpha-Me alkyne 1,4 triazole (5 carbon) alanine olefin amino acid connected by an all-carbon crosslinker comprising one double bond
  MOD_RES (14)..(14): Norleucine
  C-term NH2
LTFAXYWAQLAAALA

SEQ ID NO: 1891 - protein, 15 aa, Artificial Sequence
  Description of Artificial Sequence: Synthetic peptide
  N-term Ac
  MOD_RES (4)..(4): Alpha-Me R-azide 1,4 triazole (6 carbon) alanine olefin amino acid connected by an all-carbon crosslinker comprising one double bond
  misc_feature (4)..(11): Crosslink between residues
  MOD_RES (5)..(5): Cou4
  MOD_RES (11)..(11): Alpha-Me alkyne 1,4 triazole (5 carbon) alanine olefin amino acid connected by an all-carbon crosslinker comprising one double bond
  MOD_RES (14)..(14): Norleucine
  C-term NH2
LTFAXYWAQLAAALA

SEQ ID NO: 1892 - protein, 15 aa, Artificial Sequence
  Description of Artificial Sequence: Synthetic peptide
  N-term Ac
  MOD_RES (4)..(4): Alpha-Me R-azide 1,4 triazole (6 carbon) alanine olefin amino acid connected by an all-carbon crosslinker comprising one double bond
  misc_feature (4)..(11): Crosslink between residues
  MOD_RES (8)..(8): Cou4
  MOD_RES (11)..(11): Alpha-Me alkyne 1,4 triazole (5 carbon) alanine olefin amino acid connected by an all-carbon crosslinker comprising one double bond
  MOD_RES (14)..(14): Norleucine
  C-term NH2
LTFAAYWXQLAAALA

SEQ ID NO: 1893 - protein, 15 aa, Artificial Sequence
  Description of Artificial Sequence: Synthetic peptide
  N-term Ac
  MOD_RES (4)..(4): Alpha-Me R-azide 1,4 triazole (6 carbon) alanine olefin amino acid connected by an all-carbon crosslinker comprising one double bond
  misc_feature (4)..(11): Crosslink between residues
  MOD_RES (11)..(11): Alpha-Me alkyne 1,4 triazole (5 carbon) alanine olefin amino acid connected by an all-carbon crosslinker comprising one double bond
  MOD_RES (12)..(12): Cou4
  MOD_RES (14)..(14): Norleucine
  C-term NH2
LTFAAYWAQLAXALA

SEQ ID NO: 1894 - protein, 15 aa, Artificial Sequence
  Description of Artificial Sequence: Synthetic peptide
  N-term Ac
  MOD_RES (4)..(4): Alpha-Me R-azide 1,4 triazole (6 carbon) alanine olefin amino acid connected by an all-carbon crosslinker comprising one double bond
  misc_feature (4)..(11): Crosslink between residues
  MOD_RES (11)..(11): Alpha-Me alkyne 1,4 triazole (5 carbon) alanine olefin amino acid connected by an all-carbon crosslinker comprising one double bond
  MOD_RES (12)..(12): Cou4
  MOD_RES (14)..(14): Norleucine
  C-term NH2
LTFAAYWAQLAXALA

SEQ ID NO: 1895 - protein, 15 aa, Artificial Sequence
  Description of Artificial Sequence: Synthetic peptide
  N-term Ac
  MOD_RES (4)..(4): Alpha-Me R-azide 1,4 triazole (6 carbon) alanine olefin amino acid connected by an all-carbon crosslinker comprising one double bond
  misc_feature (4)..(11): Crosslink between residues
  MOD_RES (11)..(11): Alpha-Me alkyne 1,4 triazole (5 carbon) alanine olefin amino acid connected by an all-carbon crosslinker comprising one double bond
  MOD_RES (13)..(13): Cou4
  MOD_RES (14)..(14): Norleucine
  C-term NH2
LTFAAYWAQLAAXLA

SEQ ID NO: 1896 - protein, 15 aa, Artificial Sequence
  Description of Artificial Sequence: Synthetic peptide
  N-term Ac
  MOD_RES (4)..(4): Alpha-Me R-azide 1,4 triazole (6 carbon) alanine olefin amino acid connected by an all-carbon crosslinker comprising one double bond
  misc_feature (4)..(11): Crosslink between residues
  MOD_RES (11)..(11): Alpha-Me alkyne 1,4 triazole (5 carbon) alanine olefin amino acid connected by an all-carbon crosslinker comprising one double bond
  MOD_RES (13)..(13): Cou4
  MOD_RES (14)..(14): Norleucine
  C-term NH2
LTFAAYWAQLAAXLA

SEQ ID NO: 1897 - protein, 15 aa, Artificial Sequence
  Description of Artificial Sequence: Synthetic peptide
  N-term Ac
  MOD_RES (4)..(4): Alpha-Me R-azide 1,4 triazole (6 carbon) alanine olefin amino acid connected by an all-carbon crosslinker comprising one double bond
  misc_feature (4)..(11): Crosslink between residues
  MOD_RES (11)..(11): Alpha-Me alkyne 1,4 triazole (5 carbon) alanine olefin amino acid connected by an all-carbon crosslinker comprising one double bond
  MOD_RES (14)..(14): Norleucine
  C-term OH
LTFAAYWAQLAAALA

SEQ ID NO: 1898 - protein, 15 aa, Artificial Sequence
  Description of Artificial Sequence: Synthetic peptide
  N-term Ac
  MOD_RES (4)..(4): Alpha-Me R-azide 1,4 triazole (6 carbon) alanine olefin amino acid connected by an all-carbon crosslinker comprising one double bond
  misc_feature (4)..(11): Crosslink between residues
  MOD_RES (11)..(11): Alpha-Me alkyne 1,4 triazole (5 carbon) alanine olefin amino acid connected by an all-carbon crosslinker comprising one double bond
  MOD_RES (14)..(14): Norleucine
  C-term OH
LTFAAYWAQLAAALA

SEQ ID NO: 1899 - protein, 15 aa, Artificial Sequence
  Description of Artificial Sequence: Synthetic peptide
  N-term Ac
  MOD_RES (4)..(4): Alpha-Me R-azide 1,4 triazole (6 carbon) alanine olefin amino acid connected by an all-carbon crosslinker comprising one double bond
  misc_feature (4)..(11): Crosslink between residues
  MOD_RES (11)..(11): Alpha-Me alkyne 1,4 triazole (5 carbon) alanine olefin amino acid connected by an all-carbon crosslinker comprising one double bond
  MOD_RES (14)..(14): Norleucine
  C-term NHnPr
LTFAAYWAQLAAALA

SEQ ID NO: 1900 - protein, 15 aa, Artificial Sequence
  Description of Artificial Sequence: Synthetic peptide
  N-term Ac
  MOD_RES (4)..(4): Alpha-Me R-azide 1,4 triazole (6 carbon) alanine olefin amino acid connected by an all-carbon crosslinker comprising one double bond
  misc_feature (4)..(11): Crosslink between residues
  MOD_RES (11)..(11): Alpha-Me alkyne 1,4 triazole (5 carbon) alanine olefin amino acid connected by an all-carbon crosslinker comprising one double bond
  MOD_RES (14)..(14): Norleucine
  C-term NHnPr
LTFAAYWAQLAAALA

SEQ ID NO: 1901 - protein, 15 aa, Artificial Sequence
  Description of Artificial Sequence: Synthetic peptide
  N-term Ac
  MOD_RES (4)..(4): Alpha-Me R-azide 1,4 triazole (6 carbon) alanine olefin amino acid connected by an all-carbon crosslinker comprising one double bond
  misc_feature (4)..(11): Crosslink between residues
  MOD_RES (11)..(11): Alpha-Me alkyne 1,4 triazole (5 carbon) alanine olefin amino acid connected by an all-carbon crosslinker comprising one double bond
  MOD_RES (14)..(14): Norleucine
  C-term NHnBu33Me
LTFAAYWAQLAAALA

SEQ ID NO: 1902 - protein, 15 aa, Artificial Sequence
  Description of Artificial Sequence: Synthetic peptide
  N-term Ac
  MOD_RES (4)..(4): Alpha-Me R-azide 1,4 triazole (6 carbon) alanine olefin amino acid connected by an all-carbon crosslinker comprising one double bond
  misc_feature (4)..(11): Crosslink between residues
  MOD_RES (11)..(11): Alpha-Me alkyne 1,4 triazole (5 carbon) alanine olefin amino acid connected by an all-carbon crosslinker comprising one double bond
  MOD_RES (14)..(14): Norleucine
  C-term NHnBu33Me
LTFAAYWAQLAAALA

SEQ ID NO: 1903 - protein, 15 aa, Artificial Sequence
  Description of Artificial Sequence: Synthetic peptide
  N-term Ac
  MOD_RES (4)..(4): Alpha-Me R-azide 1,4 triazole (6 carbon) alanine olefin amino acid connected by an all-carbon crosslinker comprising one double bond
  misc_feature (4)..(11): Crosslink between residues
  MOD_RES (11)..(11): Alpha-Me alkyne 1,4 triazole (5 carbon) alanine olefin amino acid connected by an all-carbon crosslinker comprising one double bond
  MOD_RES (14)..(14): Norleucine
  C-term NHHex
LTFAAYWAQLAAALA

SEQ ID NO: 1904 - protein, 15 aa, Artificial Sequence
  Description of Artificial Sequence: Synthetic peptide
  N-term Ac
  MOD_RES (4)..(4): Alpha-Me R-azide 1,4 triazole (6 carbon) alanine olefin amino acid connected by an all-carbon crosslinker comprising one double bond
  misc_feature (4)..(11): Crosslink between residues
  MOD_RES (11)..(11): Alpha-Me alkyne 1,4 triazole (5 carbon) alanine olefin amino acid connected by an all-carbon crosslinker comprising one double bond
  MOD_RES (14)..(14): Norleucine
  N-term NHHex
LTFAAYWAQLAAALA

SEQ ID NO: 1905 - protein, 15 aa, Artificial Sequence
  Description of Artificial Sequence: Synthetic peptide
  N-term Ac
  MOD_RES (4)..(4): Alpha-Me R-azide 1,4 triazole (6 carbon) alanine olefin amino acid connected by an all-carbon crosslinker comprising one double bond
  misc_feature (4)..(11): Crosslink between residues
  MOD_RES (11)..(11): Alpha-Me alkyne 1,4 triazole (5 carbon) alanine olefin amino acid connected by an all-carbon crosslinker comprising one double bond
  MOD_RES (14)..(14): Norleucine
  C-term NH2
LTAAAYWAQLAAALA

SEQ ID NO: 1906 - protein, 15 aa, Artificial Sequence
  Description of Artificial Sequence: Synthetic peptide
  N-term Ac
  MOD_RES (3)..(3): homo-Leu
  MOD_RES (4)..(4): Alpha-Me R-azide 1,4 triazole (6 carbon) alanine olefin amino acid connected by an all-carbon crosslinker comprising one double bond
  misc_feature (4)..(11): Crosslink between residues
  MOD_RES (11)..(11): Alpha-Me alkyne 1,4 triazole (5 carbon) alanine olefin amino acid connected by an all-carbon crosslinker comprising one double bond
  MOD_RES (14)..(14): Norleucine
  C-term NH2
LTLAAYWAQLAAALA

SEQ ID NO: 1907 - protein, 15 aa, Artificial Sequence
  Description of Artificial Sequence: Synthetic peptide
  N-term Ac
  MOD_RES (4)..(4): Alpha-Me R-azide 1,4 triazole (6 carbon) alanine olefin amino acid connected by an all-carbon crosslinker comprising one double bond
  misc_feature (4)..(11): Crosslink between residues
  MOD_RES (11)..(11): Alpha-Me alkyne 1,4 triazole (5 carbon) alanine olefin amino acid connected by an all-carbon crosslinker comprising one double bond
  MOD_RES (14)..(14): Norleucine
  C-term NH2
LTFAAYAAQLAAALA

SEQ ID NO: 1908 - protein, 15 aa, Artificial Sequence
  Description of Artificial Sequence: Synthetic peptide
  N-term Ac
  MOD_RES (4)..(4): Alpha-Me R-azide 1,4 triazole (6 carbon) alanine olefin amino acid connected by an all-carbon crosslinker comprising one double bond
  misc_feature (4)..(11): Crosslink between residues
  MOD_RES (7)..(7): 2Nal
  MOD_RES (11)..(11): Alpha-Me alkyne 1,4 triazole (5 carbon) alanine olefin amino acid connected by an all-carbon crosslinker comprising one double bond
  MOD_RES (14)..(14): Norleucine
  C-term NH2
LTFAAYAAQLAAALA

SEQ ID NO: 1909 - protein, 14 aa, Artificial Sequence
  Description of Artificial Sequence: Synthetic peptide
  N-term Ac
  MOD_RES (4)..(4): Alpha-Me R-azide 1,4 triazole (6 carbon) alanine olefin amino acid connected by an all-carbon crosslinker comprising one double bond
  misc_feature (4)..(11): Crosslink between residues
  MOD_RES (8)..(8): Cou4
  MOD_RES (10)..(10): Cyclobutyl-Ala
  MOD_RES (11)..(11): Alpha-Me alkyne 1,4 triazole (5 carbon) alanine olefin amino acid connected by an all-carbon crosslinker comprising one double bond
  C-term NH2
LTFAEYWXQAASAA

SEQ ID NO: 1910 - protein, 14 aa, Artificial Sequence
  Description of Artificial Sequence: Synthetic peptide
  N-term Ac
  MOD_RES (4)..(4): Alpha-Me R-azide 1,4 triazole (6 carbon) alanine olefin amino acid connected by an all-carbon crosslinker comprising one double bond
  misc_feature (4)..(11): Crosslink between residues
  MOD_RES (8)..(8): Cou7
  MOD_RES (10)..(10): Cyclobutyl-Ala
  MOD_RES (11)..(11): Alpha-Me alkyne 1,4 triazole (5 carbon) alanine olefin amino acid connected by an all-carbon crosslinker comprising one double bond
  C-term NH2
LTFAEYWXQAASAA

SEQ ID NO: 1911 - protein, 14 aa, Artificial Sequence
  Description of Artificial Sequence: Synthetic peptide
  N-term Dmaac
  MOD_RES (4)..(4): Alpha-Me R-azide 1,4 triazole (6 carbon) alanine olefin amino acid connected by an all-carbon crosslinker comprising one double bond
  misc_feature (4)..(11): Crosslink between residues
  MOD_RES (10)..(10): Cyclobutyl-Ala
  MOD_RES (11)..(11): Alpha-Me alkyne 1,4 triazole (5 carbon) alanine olefin amino acid connected by an all-carbon crosslinker comprising one double bond
  C-term NH2
LTFAEYWAQAASAA

SEQ ID NO: 1912 - protein, 17 aa, Artificial Sequence
  Description of Artificial Sequence: Synthetic peptide
  N-term Dmaac
  MOD_RES (4)..(4): Alpha-Me R-azide 1,4 triazole (6 carbon) alanine olefin amino acid connected by an all-carbon crosslinker comprising one double bond
  misc_feature (4)..(11): Crosslink between residues
  MOD_RES (11)..(11): Alpha-Me alkyne 1,4 triazole (5 carbon) alanine olefin amino acid connected by an all-carbon crosslinker comprising one double bond
  MOD_RES (17)..(17): D-amino acid
  C-term NH2
LTFAAYWAQLAAAAAAA

SEQ ID NO: 1913 - protein, 17 aa, Artificial Sequence
  Description of Artificial Sequence: Synthetic peptide
  N-term Dmaac
  MOD_RES (4)..(4): Alpha-Me R-azide 1,4 triazole (6 carbon) alanine olefin amino acid connected by an all-carbon crosslinker comprising one double bond
  misc_feature (4)..(11): Crosslink between residues
  MOD_RES (11)..(11): Alpha-Me alkyne 1,4 triazole (5 carbon) alanine olefin amino acid connected by an all-carbon crosslinker comprising one double bond
  MOD_RES (17)..(17): D-amino acid
  C-term NH2
LTFAEYWAQLAAAAAAA

SEQ ID NO: 1914 - protein, 15 aa, Artificial Sequence
  Description of Artificial Sequence: Synthetic peptide
  N-term Dmaac
  MOD_RES (4)..(4): Alpha-Me R-azide 1,4 triazole (6 carbon) alanine olefin amino acid connected by an all-carbon crosslinker comprising one double bond
  misc_feature (4)..(11): Crosslink between residues
  MOD_RES (6)..(6): 4-carboxy-Phe
  MOD_RES (10)..(10): Cyclobutyl-Ala
  MOD_RES (11)..(11): Alpha-Me alkyne 1,4 triazole (5 carbon) alanine olefin amino acid connected by an all-carbon crosslinker comprising one double bond
  MOD_RES (15)..(15): D-amino acid
  C-term NH2
LTFAEFWAQAAAAIA

SEQ ID NO: 1915 - protein, 15 aa, Artificial Sequence
  Description of Artificial Sequence: Synthetic peptide
  N-term Dmaac
  MOD_RES (4)..(4): Alpha-Me R-azide 1,4 triazole (6 carbon) alanine olefin amino acid connected by an all-carbon crosslinker comprising one double bond
  misc_feature (4)..(11): Crosslink between residues
  MOD_RES (6)..(6): 4-carboxy-Phe
  MOD_RES (10)..(10): Cyclobutyl-Ala
  MOD_RES (11)..(11): Alpha-Me alkyne 1,4 triazole (5 carbon) alanine olefin amino acid connected by an all-carbon crosslinker comprising one double bond
  MOD_RES (15)..(15): D-amino acid
  C-term NH2
LTFAEFWAQAAAAIA

SEQ ID NO: 1916 - protein, 15 aa, Artificial Sequence
  Description of Artificial Sequence: Synthetic peptide
  N-term Dmaac
  MOD_RES (4)..(4): Alpha-Me R-azide 1,4 triazole (6 carbon) alanine olefin amino acid connected by an all-carbon crosslinker comprising one double bond
  misc_feature (4)..(11): Crosslink between residues
  MOD_RES (11)..(11): Alpha-Me alkyne 1,4 triazole (5 carbon) alanine olefin amino acid connected by an all-carbon crosslinker comprising one double bond
  MOD_RES (14)..(14): Norleucine
  C-term NH2
LTFAAYWAQLAAALA

SEQ ID NO: 1917 - protein, 16 aa, Artificial Sequence
  Description of Artificial Sequence: Synthetic peptide
  MOD_RES (1)..(1): Cou6
  MOD_RES (2)..(2): Beta-Ala
  MOD_RES (6)..(6): Alpha-Me R-azide 1,4 triazole (6 carbon) alanine olefin amino acid connected by an all-carbon crosslinker comprising one double bond
  misc_feature (6)..(13): Crosslink between residues
  MOD_RES (12)..(12): homo-Leu
  MOD_RES (13)..(13): Alpha-Me alkyne 1,4 triazole (5 carbon) alanine olefin amino acid connected by an all-carbon crosslinker comprising one double bond
  C-term NH2
XALTFAEYWAQLASAA

SEQ ID NO: 1918 - protein, 16 aa, Artificial Sequence
  Description of Artificial Sequence: Synthetic peptide
  MOD_RES (1)..(1): Cou8
  MOD_RES (2)..(2): Beta-Ala
  MOD_RES (6)..(6): Alpha-Me R-azide 1,4 triazole (6 carbon) alanine olefin amino acid connected by an all-carbon crosslinker comprising one double bond
  misc_feature (6)..(13): Crosslink between residues
  MOD_RES (12)..(12): homo-Leu
  MOD_RES (13)..(13): Alpha-Me alkyne 1,4 triazole (5 carbon) alanine olefin amino acid connected by an all-carbon crosslinker comprising one double bond
  C-term NH2
XALTFAEYWAQLASAA

SEQ ID NO: 1919 - protein, 17 aa, Artificial Sequence
  Description of Artificial Sequence: Synthetic peptide
  N-term Ac
  MOD_RES (3)..(3): 4-iodo-Phe
  MOD_RES (4)..(4): Alpha-Me R-azide 1,4 triazole (6 carbon) alanine olefin amino acid connected by an all-carbon crosslinker comprising one double bond
  misc_feature (4)..(11): Crosslink between residues
  MOD_RES (11)..(11): Alpha-Me alkyne 1,4 triazole (5 carbon) alanine olefin amino acid connected by an all-carbon crosslinker comprising one double bond
  MOD_RES (17)..(17): D-amino acid
  C-term NH2
LTFAEYWAQLAAAAAAA

SEQ ID NO: 1920 - protein, 15 aa, Artificial Sequence
  Description of Artificial Sequence: Synthetic peptide
  N-term Ac
  MOD_RES (4)..(4): Alpha-Me R-azide 1,4 triazole (6 carbon) alanine olefin amino acid connected by an all-carbon crosslinker comprising one double bond
  misc_feature (4)..(11): Crosslink between residues
  MOD_RES (11)..(11): Alpha-Me alkyne 1,4 triazole (5 carbon) alanine olefin amino acid connected by an all-carbon crosslinker comprising one double bond
  MOD_RES (14)..(14): Norleucine
  C-term NH2
LTFAAYWAQLAAALA

SEQ ID NO: 1921 - protein, 17 aa, Artificial Sequence
  Description of Artificial Sequence: Synthetic peptide
  N-term Ac
  MOD_RES (4)..(4): Alpha-Me R-azide 1,4 triazole (6 carbon) alanine olefin amino acid connected by an all-carbon crosslinker comprising one double bond
  misc_feature (4)..(11): Crosslink between residues
  MOD_RES (11)..(11): Alpha-Me alkyne 1,4 triazole (5 carbon) alanine olefin amino acid connected by an all-carbon crosslinker comprising one double bond
  MOD_RES (17)..(17): D-amino acid
  C-term NH2
LTFAAYWAQLAAAAAAA

SEQ ID NO: 1922 - protein, 17 aa, Artificial Sequence
  Description of Artificial Sequence: Synthetic peptide
  N-term Ac
  MOD_RES (4)..(4): Alpha-Me R-azide 1,4 triazole (6 carbon) alanine olefin amino acid connected by an all-carbon crosslinker comprising one double bond
  misc_feature (4)..(11): Crosslink between residues
  MOD_RES (11)..(11): Alpha-Me alkyne 1,4 triazole (5 carbon) alanine olefin amino acid connected by an all-carbon crosslinker comprising one double bond
  MOD_RES (17)..(17): D-amino acid
  C-term NH2
LTFAEYWAQLAAAAAAA

SEQ ID NO: 1923 - protein, 17 aa, Artificial Sequence
  Description of Artificial Sequence: Synthetic peptide
  N-term Ac
  MOD_RES (4)..(4): Alpha-Me R-azide 1,5 triazole (6 carbon) alanine olefin amino acid connected by an all-carbon crosslinker comprising one double bond
  misc_feature (4)..(11): Crosslink between residues
  MOD_RES (11)..(11): Alpha-Me alkyne 1,5 triazole (5 carbon) alanine olefin amino acid connected by an all-carbon crosslinker comprising one double bond
  MOD_RES (17)..(17): D-amino acid
  C-term NH2
LTFAAYWAQLAAAAAAA

SEQ ID NO: 1924 - protein, 14 aa, Artificial Sequence
  Description of Artificial Sequence: Synthetic peptide
  N-term Ac
  MOD_RES (4)..(4): Alpha-Me R-azide 1,4 triazole (6 carbon) alanine olefin amino acid connected by an all-carbon crosslinker comprising one double bond
  misc_feature (4)..(11): Crosslink between residues
  MOD_RES (10)..(10): Cyclobutyl-Ala
  MOD_RES (11)..(11): Alpha-Me alkyne 1,4 triazole (5 carbon) alanine olefin amino acid connected by an all-carbon crosslinker comprising one double bond
  C-term NH2
LTFAEYWAQAASAA

SEQ ID NO: 1925 - protein, 14 aa, Artificial Sequence
  Description of Artificial Sequence: Synthetic peptide
  N-term Ac
  MOD_RES (4)..(4): Alpha-Me R-azide 1,4 triazole (4 carbon) alanine olefin amino acid connected by an all-carbon crosslinker comprising one double bond
  misc_feature (4)..(11): Crosslink between residues
  MOD_RES (10)..(10): Cyclobutyl-Ala
  MOD_RES (11)..(11): Alpha-Me alkyne 1,4 triazole (5 carbon) alanine olefin amino acid connected by an all-carbon crosslinker comprising one double bond
  C-term NH2
LTFAEYWAQAASAA

SEQ ID NO: 1926 - protein, 14 aa, Artificial Sequence
  Description of Artificial Sequence: Synthetic peptide
  N-term Ac
  MOD_RES (4)..(4): Alpha-Me R-azide 1,4 triazole (5 carbon) alanine olefin amino acid connected by an all-carbon crosslinker comprising one double bond
  misc_feature (4)..(11): Crosslink between residues
  MOD_RES (10)..(10): Cyclobutyl-Ala
  MOD_RES (11)..(11): Alpha-Me alkyne 1,4 triazole (5 carbon) alanine olefin amino acid connected by an all-carbon crosslinker comprising one double bond
  C-term NH2
LTFAEYWAQAASAA

SEQ ID NO: 1927 - protein, 14 aa, Artificial Sequence
  Description of Artificial Sequence: Synthetic peptide
  N-term Ac
  MOD_RES (4)..(4): Alpha-Me R-azide 1,5 triazole (6 carbon) alanine olefin amino acid connected by an all-carbon crosslinker comprising one double bond
  misc_feature (4)..(11): Crosslink between residues
  MOD_RES (10)..(10): Cyclobutyl-Ala
  MOD_RES (11)..(11): Alpha-Me alkyne 1,5 triazole (5 carbon) alanine olefin amino acid connected by an all-carbon crosslinker comprising one double bond
  C-term NH2
LTFAEYWAQAASAA

SEQ ID NO: 1928 - protein, 14 aa, Artificial Sequence
  Description of Artificial Sequence: Synthetic peptide
  N-term Ac
  MOD_RES (4)..(4): Alpha-Me R-azide 1,4 triazole (6 carbon) alanine olefin amino acid connected by an all-carbon crosslinker comprising one double bond
  misc_feature (4)..(11): Crosslink between residues
  MOD_RES (10)..(10): Cyclobutyl-Ala
  MOD_RES (11)..(11): 5I-Alpha-Me alkyne 1,4 triazole (5 carbon) alanine olefin amino acid connected by an all-carbon crosslinker comprising one double bond
  C-term NH2
LTFAEYWAQAASAA

SEQ ID NO: 1929 - protein, 14 aa, Artificial Sequence
  Description of Artificial Sequence: Synthetic peptide
  N-term Ac
  MOD_RES (4)..(4): Alpha-Me R-azide 1,5 triazole (6 carbon) alanine olefin amino acid connected by an all-carbon crosslinker comprising one double bond
  misc_feature (4)..(11): Crosslink between residues
  MOD_RES (10)..(10): Cyclobutyl-Ala
  MOD_RES (11)..(11): Alpha-Me alkyne 1,5 triazole (5 carbon) alanine olefin amino acid connected by an all-carbon crosslinker comprising one double bond
  C-term NH2
LTAAEYWAQAASAA

SEQ ID NO: 1930 - protein, 14 aa, Artificial Sequence
  Description of Artificial Sequence: Synthetic peptide
  N-term Ac
  MOD_RES (4)..(4): Alpha-Me R-azide 1,4 triazole (6 carbon) alanine olefin amino acid connected by an all-carbon crosslinker comprising one double bond
  misc_feature (4)..(11): Crosslink between residues
  MOD_RES (10)..(10): Cyclobutyl-Ala
  MOD_RES (11)..(11): Alpha-Me alkyne 1,4 triazole (5 carbon) alanine olefin amino acid connected by an all-carbon crosslinker comprising one double bond
  C-term NH2
LTAAEYWAQAASAA

SEQ ID NO: 1931 - protein, 15 aa, Artificial Sequence
  Description of Artificial Sequence: Synthetic peptide
  N-term 5-FAM
  MOD_RES (1)..(1): Beta-Ala
  MOD_RES (5)..(5): Alpha-Me R-azide 1,4 triazole (6 carbon) alanine olefin amino acid connected by an all-carbon crosslinker comprising one double bond
  misc_feature (5)..(12): Crosslink between residues
  MOD_RES (11)..(11): Cyclobutyl-Ala
  MOD_RES (12)..(12): Alpha-Me alkyne 1,4 triazole (5 carbon) alanine olefin amino acid connected by an all-carbon crosslinker comprising one double bond
  C-term NH2
ALTFAEYWAQAASAA

SEQ ID NO: 1932 - protein, 15 aa, Artificial Sequence
  Description of Artificial Sequence: Synthetic peptide
  N-term 5-FAM
  MOD_RES (1)..(1): Beta-Ala
  MOD_RES (5)..(5): Alpha-Me R-azide 1,4 triazole (6 carbon) alanine olefin amino acid connected by an all-carbon crosslinker comprising one double bond
  misc_feature (5)..(12): Crosslink between residues
  MOD_RES (11)..(11): Cyclobutyl-Ala
  MOD_RES (12)..(12): Alpha-Me alkyne 1,4 triazole (5 carbon) alanine olefin amino acid connected by an all-carbon crosslinker comprising one double bond
  C-term NH2
ALTAAEYWAQAASAA

SEQ ID NO: 1933 - protein, 15 aa, Artificial Sequence
  Description of Artificial Sequence: Synthetic peptide
  N-term 5-FAM
  MOD_RES (1)..(1): Beta-Ala
  MOD_RES (5)..(5): Alpha-Me R-azide 1,5 triazole (6 carbon) alanine olefin amino acid connected by an all-carbon crosslinker comprising one double bond
  misc_feature (5)..(12): Crosslink between residues
  MOD_RES (11)..(11): Cyclobutyl-Ala
  MOD_RES (12)..(12): Alpha-Me alkyne 1,5 triazole (5 carbon) alanine olefin amino acid connected by an all-carbon crosslinker comprising one double bond
  C-term NH2
ALTFAEYWAQAASAA

SEQ ID NO: 1934 - protein, 15 aa, Artificial Sequence
  Description of Artificial Sequence: Synthetic peptide
  N-term 5-FAM
  MOD_RES (1)..(1): Beta-Ala
  MOD_RES (5)..(5): Alpha-Me R-azide 1,5 triazole (6 carbon) alanine olefin amino acid connected by an all-carbon crosslinker comprising one double bond
  misc_feature (5)..(12): Crosslink between residues
  MOD_RES (11)..(11): Cyclobutyl-Ala
  MOD_RES (12)..(12): Alpha-Me alkyne 1,5 triazole (5 carbon) alanine olefin amino acid connected by an all-carbon crosslinker comprising one double bond
  C-term NH2
ALTAAEYWAQAASAA

SEQ ID NO: 1935 - protein, 14 aa, Artificial Sequence
  Description of Artificial Sequence: Synthetic peptide
  N-term Ac
  MOD_RES (4)..(4): Alpha-Me R-azide 1,4 triazole (6 carbon) alanine olefin amino acid connected by an all-carbon crosslinker comprising one double bond
  misc_feature (4)..(11): Crosslink between residues
  MOD_RES (10)..(10): Cyclobutyl-Ala
  MOD_RES (11)..(11): 5Ph-alpha-Me alkyne 1,4 triazole (5 carbon) alanine olefin amino acid connected by an all-carbon crosslinker comprising one double bond
  C-term NH2
LTFAEYWAQAASAA

SEQ ID NO: 1936 - protein, 14 aa, Artificial Sequence
  Description of Artificial Sequence: Synthetic peptide
  N-term Ac
  MOD_RES (4)..(4): Alpha-Me R-azide 1,4 triazole (6 carbon) alanine olefin amino acid connected by an all-carbon crosslinker comprising one double bond
  misc_feature (4)..(11): Crosslink between residues
  MOD_RES (10)..(10): Cyclobutyl-Ala
  MOD_RES (11)..(11): 5Prp-alpha-Me alkyne 1,4 triazole (5 carbon) alanine olefin amino acid connected by an all-carbon crosslinker comprising one double bond
  C-term NH2
LTFAEYWAQAASAA

SEQ ID NO: 1937 - protein, 17 aa, Artificial Sequence
  Description of Artificial Sequence: Synthetic peptide
  N-term Ac
  MOD_RES (4)..(4): Alpha-Me R-azide 1,4 triazole (6 carbon) alanine olefin amino acid connected by an all-carbon crosslinker comprising one double bond
  misc_feature (4)..(11): Crosslink between residues
  MOD_RES (11)..(11): Alpha-Me alkyne 1,4 triazole (5 carbon) alanine olefin amino acid connected by an all-carbon crosslinker comprising one double bond
  MOD_RES (17)..(17): D-amino acid
  C-term NH2
LTFAAYWAALAAAAAAA

SEQ ID NO: 1938 - protein, 14 aa, Artificial Sequence
  Description of Artificial Sequence: Synthetic peptide
  N-term Ac
  MOD_RES (4)..(4): Alpha-Me R-azide 1,4 triazole (6 carbon) alanine olefin amino acid connected by an all-carbon crosslinker comprising one double bond
  misc_feature (4)..(11): Crosslink between residues
  MOD_RES (10)..(10): Cyclobutyl-Ala
  MOD_RES (11)..(11): 5penNH2-alpha-Me alkyne 1,4 triazole (5 carbon) alanine olefin amino acid connected by an all-carbon crosslinker comprising one double bond
  C-term NH2
LTFAEYWAQAASAA

SEQ ID NO: 1939 - protein, 14 aa, Artificial Sequence
  Description of Artificial Sequence: Synthetic peptide
  N-term Ac
  MOD_RES (4)..(4): Alpha-Me R-azide 1,4 triazole (6 carbon) alanine olefin amino acid connected by an all-carbon crosslinker comprising one double bond
  misc_feature (4)..(11): Crosslink between residues
  MOD_RES (10)..(10): Cyclobutyl-Ala
  MOD_RES (11)..(11): 5BnzNH2-alpha-Me alkyne 1,4 triazole (5 carbon) alanine olefin amino acid connected by an all-carbon crosslinker comprising one double bond
  C-term NH2
LTFAEYWAQAASAA

SEQ ID NO: 1940 - protein, 14 aa, Artificial Sequence
  Description of Artificial Sequence: Synthetic peptide
  N-term Ac
  MOD_RES (4)..(4): Alpha-Me R-azide 1,4 triazole (6 carbon) alanine olefin amino acid connected by an all-carbon crosslinker comprising one double bond
  misc_feature (4)..(11): Crosslink between residues
  MOD_RES (10)..(10): Cyclobutyl-Ala
  MOD_RES (11)..(11): 5prpOMe-alpha-Me alkyne 1,4 triazole (5 carbon) alanine olefin amino acid connected by an all-carbon crosslinker comprising one double bond
  C-term NH2
LTFAEYWAQAASAA

SEQ ID NO: 1941 - protein, 17 aa, Artificial Sequence
  Description of Artificial Sequence: Synthetic peptide
  N-term Ac
  MOD_RES (4)..(4): Alpha-Me R-azide 1,5 triazole (6 carbon) alanine olefin amino acid connected by an all-carbon crosslinker comprising one double bond
  misc_feature (4)..(11): Crosslink between residues
  MOD_RES (11)..(11): 4Me-alpha-Me alkyne 1,5 triazole (5 carbon) alanine olefin amino acid connected by an all-carbon crosslinker comprising one double bond
  MOD_RES (17)..(17): D-amino acid
  C-term NH2
LTFAEYWAQLAAAAAAA

SEQ ID NO: 1942 - protein, 17 aa, Artificial Sequence
  Description of Artificial Sequence: Synthetic peptide
  N-term Ac
  MOD_RES (4)..(4): Alpha-Me R-azide 1,5 triazole (6 carbon) alanine olefin amino acid connected by an all-carbon crosslinker comprising one double bond
  misc_feature (4)..(11): Crosslink between residues
  MOD_RES (11)..(11): 4Ph-alpha-Me alkyne 1,5 triazole (5 carbon) alanine olefin amino acid connected by an all-carbon crosslinker comprising one double bond
  MOD_RES (17)..(17): D-amino acid
  C-term NH2
LTFAEYWAQLAAAAAAA

SEQ ID NO: 1943 - protein, 14 aa, Artificial Sequence
  Description of Artificial Sequence: Synthetic peptide
  N-term Ac
  MOD_RES (4)..(4): Alpha-Me R-azide 1,5 triazole (6 carbon) alanine olefin amino acid connected by an all-carbon crosslinker comprising one double bond
  misc_feature (4)..(11): Crosslink between residues
  MOD_RES (10)..(10): Cyclobutyl-Ala
  MOD_RES (11)..(11): 4Me-alpha-Me alkyne 1,5 triazole (5 carbon) alanine olefin amino acid connected by an all-carbon crosslinker comprising one double bond
  C-term NH2
LTFAEYWAQAASAA

SEQ ID NO: 1944 - protein, 14 aa, Artificial Sequence
  Description of Artificial Sequence: Synthetic peptide
  N-term Ac
  MOD_RES (4)..(4): Alpha-Me R-azide 1,5 triazole (6 carbon) alanine olefin amino acid connected by an all-carbon crosslinker comprising one double bond
  misc_feature (4)..(11): Crosslink between residues
  MOD_RES (10)..(10): Cyclobutyl-Ala
  MOD_RES (11)..(11): 4Ph-alpha-Me alkyne 1,5 triazole (5 carbon) alanine olefin amino acid connected by an all-carbon crosslinker comprising one double bond
  C-term NH2
LTFAEYWAQAASAA

SEQ ID NO: 1945 - protein, 10 aa, Artificial Sequence
  Description of Artificial Sequence: Synthetic peptide
  MOD_RES (2)..(2): Any amino acid
  MOD_RES (9)..(9): Any amino acid
FXHYWAQLXS

SEQ ID NO: 1946 - protein, 10 aa, Artificial Sequence
  Description of Artificial Sequence: Synthetic peptide
  MOD_RES (2)..(2): Any amino acid
  MOD_RES (8)..(8): Leu or Cyclobutyl-Ala
  MOD_RES (9)..(9): Any amino acid
FXEYWAQXXA

SEQ ID NO: 1947 - protein, 13 aa, Artificial Sequence
  Description of Artificial Sequence: Synthetic peptide
  N-term 5-FAM
  MOD_RES (1)..(1): Beta-Ala
  C-term NH2
ALTFEHYWAQLTS

SEQ ID NO: 1948 - protein, 6 aa, Artificial Sequence
  Description of Artificial Sequence: Synthetic 6xHis tag
HHHHHH

SEQ ID NO: 1949 - protein, 393 aa, Homo sapiens [sequence omitted]
